United States Patent Application Publication US 2026/0258423 A1 - sequence listing, part 60

SEQ ID NO: 301568 - DNA, 83257441 bp, Homo sapiens (residues 44,830,948-46,965,754 of 83,257,441)
  source 1..83257441: mol_type = genomic DNA
ttttaaaatgcccagtaggaaaccgaaaattctccaaatgctttaagtagagtaagactttgggtaataaaggaaggctcagtaaagagatgggcgacctctggaatgatctcatctgagcatcagaatgccgatggacaggcttttattattttgcccttttgaccagaggggaaattaagcgctaacaagtgaggttacttgctgcaagtcaaactcccccacccaaagccaagccctaaggggtagccccagagtggaaatcttgaaggctaggcatctaatgcactgaccagttttgtgtggccagtatgttttccaaaaatatgaattagttaccaaaatattaaaatccagatttctggcctccctaaaaagtcaaaagctgcttactttgagcttctcttttcacatggcagctcctcttgagtcaccttgtccgggtaggcaatgtccccactcagctgcttaaatcatttcatgacctgcttggcctcggagcatttaagtacttctccctgtgattgctgtagtctgtccccacgccttatcacattgcctctctacagatgtatttaaaatgacaagtgtgggatgggcgcggtggctcacgcctgtaattccagcactttgggaggcctaggcaggcggattgcttgagccctggggttccagaccagcctggacaatatggcaaaacccccatctctacaaaaaatacaaaaattagccgggtgtggtgacgcgcacctgtgatcctagctactccaagcatgaggtgggaggatcgcttgagcccgggaggtcaaggctgcagtaagctgagatagcgccactgcactccagcctgagcgacagagtgagaccctgtctcaaaaaaataagtgaaaaaaataaaatgaccagggtgaaaactctgaaaatacctggaaataataaatagcatgtaactaaaataacacaggaaacaacatcattgtacctgttgaataaaatattaaaattctcacagcctgcaactgtaaactagtacaaataacttttttgttttgttttgttttgagggagagtctcactctgtcgccaggctggagtgcagtgggcgccatctaggctcactgcaagctccacctccccggttcaagcaattctcctgcctcagcctcccgagtagctgggactacaggcgcacgcaaccacgcccaactaatttttgtatttttagtagagacagggtttcaccatgttggccaggatggtctcgatctcctgaccttgtgatccgcctgcctcggcctcccaaagtgctgggattacaggcatgagccaccgtgcctggcctaaatcactttgttgttgtttttgcaacagagtctcactctgtcgcccacgctggagtgcagtggggtgatctcggctcactgcgatgtccgcctcccaggttcaaaagattctactacctcagcctccggagtagctgggaatacaggtgcccgccatcatgcctggctaatttttgtatttttagtagaaagggggtttcaccatgttggccaggctggtctcaaatcctgacctcaagtgatctgcccgccttggcctcccaaagagctgggattacagacatgagccaccgtgcccagcggactttgcaaaactggcaatatctactgttgaggctcagaaaatgatttcccagggcgtggtggctgtagtcccagctactcaggaaactgcagtgggctatgattatgccactacactccagcctggaagacagagcgagaccccatctctttaaaaaagaaagaaagaaaacaatatcccaaagtatggagctttggcgtgctgagtgctttgaactaaaggagattggaaggcctcagaagcaaagtctctctctgaccttctcctgccctcctgtctcccgcccctttctcccctgaagcgagtcatagaaataaaaattcctcttccccaaggcgggtcatagaaactagaacccctctcccccaaagcaagccataaaaccagaaaggtcactctcccccttctctcctcccccttgaagaccctcattccagaggaaccaggaaggaataccctggaggaaggaatgttacactgggaagccaagaagaatttgaaccgacaagccttgttgggttccccgctcagtctgttaaattagatcataccccttttgtctgatcacattctgcttgtccattctgcattgaacctaagcataaaaacaattgttctagggtattgagggtgtgtgtgtgtgtgtgtgtgtgtgtgtgtgagagagagagagagagagaccgggtctctctccatcacccaggctggagtgcagtggcatgatctcggctcactgcaacctccgcctcccaggttcaactgattctcatgcctcagcctcccaagcagctgggactacaggcgcacaccaccacgcccggctaattttttttgtatttttagtagagactggttttcactatgttggtgaggctggtcttgaactcctgacctcgtgatccacccgcctaggcctcccaaagtgctgggattacaggtgtgagccaccgcactcggccctttgaggtcttaatttccgaagtctcttgtgttacataaaactttggttaaataacttggttatgcccttctcttgttaatctgggttttgttataggagtgtcagctgtgatccttatgatggatgaggaaaggtgtcacacctttccgccactacactactaaagctgaacctatgaatacactatgcctttggaattccatggcaattccacgaaaatgtgtacaaatgttcaccaaaatacttgtactagagtattcatagcagcactatttataataagtcaaaaaactagaaactacccaaaatgcctgtcaaccgtagaatggctaaattgtgttacgtacattatgctgcaatgaaaatgaacaatctacatttacacataagatggatctcacaaaagttttcatttacaaaaacttcaaaaacagacaaaactggccaggtgctgtggctcatgcctgttatcccagcgcttagggaggccaaggtgggcggatcacttgagctcagtagttcaagaccagccttagcaacatggcaaaaccttacctctacaaaaaatacaaaaattagccaggcatggttgcatgtgcctggagtctcagctactccagaggctgaggtggtgaggtgggaagatcacttgagctggggaagttgaggctgcagtgagctgtgattgtgccactgaaccactgcaccactgcactccagcctgggttacagagcaagaccgcgtttaaaaaaaaacaaaacaacaacaacaaaaaaaaaaaacaagcaaaactaatccatgccgttagaagtagggacagttggccaggcgcggtggctcacgcctgtaatcccagcactctgggaggccgaggggagcagatcacctaaggtcaggagttcaagaccagcctggctaacatggtgaaaacccatttctactaaaaatacaaaaaattagatgggtgtggtggcgcatgcctgtaatcccagctactcaggaggctgaggcaggagaattgcttgaacctgggaggcagaggttgcagtgagctgagatcatgccattgcactgcagcttggggcaacaagagcaaaactcaaaaaaaaaaaaaaaagaagtagtaaggtgcagtggctcacgcctgtaatcccagcactaaaccccgtctctactaaaaatacaaaaattagctgggcgtggtggcgcatgcctgtaatcccagctactccggaggctgagacgagaattgcttgaaccagggagttggaggttacagtgagtggagattgtgccactgcactccagcctgggtatagagcaaggctccgtctcaaaaaaagaagaagtaaggccagtgggctgggcacagtggctcacgcctatgatcccagcactttgggagggtgaggcaggtggatcacctgaggtcagaagtttgagaccagcctggctaacatggtgaaaccccatttctactaaaaatacaaaaaattagctgggcgtggtggtgtgagcctgtaatccctgctacttgggaggctgagttggaggttgcagtgagccgagattgcgccactgcactccagcctggggacagagcaagacttggtctcaaaaaaaaaattagaaggatagtgggctgggcacagtgcctcacacctgtaatcccagcattttgggaggatgaggcaggtggatcacctgaggtcaggagttcgagaccagcctgaccaatatggtgaaactctgtctctactaaaaatacaaaaattagctgggtgtggtggcatgcgtctgtgagaactgcttgaacccaggaggcagaggttgcagtgagccaagctcccgccactgtactccagcctgggtgacagagtaagactctgtctcaaaaaaaaaaaaaaaagaaagagagaagtaaggaaggatagtggttacttggcaggcaggatagttactggaaaggagcatgaggggtttttggggggctggccttgttctgttgaaactgcctttgcaaaaatcatgacagtgagaaaaatctgacacaggctggggacggtggctcatgcctgtaatcccaagcattttgggaggctgaggtggtggatcacctaaggtcaggagttcgagaccagcctggacaacatggtgaaaccccatctctactaaaaatacaaaaaattagccgggcgtggtggtggatgcctgtaatctcagctactcgggaggctgaggcaggagaactgcttgaacccaggaggtggaggttgcagtgagccaagattgcgccattgcactccagcctgggtgacagagcaagactctgtcttaaataaataaatacataaataaaataaaataaaataaaatacaaaagaagtagccgggagtggttgcacatgcctgcaatcccagctacttggcacgagaattgcttgaacccaggaggcggaggttgcagtaagcaaagatctcgccactgcactctagcctgggcaacagagagagactgtctcaaaaaacaacaacaaaaagaaaaatctgacacaggaaaattacaacagtgaaagagatctgacctaaccgactccatcttacttttaacctccaagctgcccttgttcattcctgggaataggctgagttctccatgggaggaattgactttataatttaatttggaaacaaagacgataagagtcccttcccaaaataaatcccttctgcctggggaccagactgcctttgtagaactagcaaatcagctataagattagaaattaggggccaggccggtggctcacacctgtaatcggagcactttgggaggccgaggcaggcggatcacctgaggtcaggagttcaagaccagcctgaccaacatggagaaaccctgcctctactgaaaatacaaaaaaattagctgggcgtggtggcgcatgcctataatcccagctacccgggaggctgaggcaggagaatcgattgaacccgggaggcagaggttgcggtgagccgagaccgcaccgttgcactccagcctgggcaacaagagtgaaactccatctcaaaacaaaaaaaaaaaattagaaattagggctcaggagtcatgcagccagaggccatgagattcctaacctcagccgggcacggtggctcacgcctgtaatcccagaactttgggaggccgaggtgggtggatcacgaggtcaggagatcgagaccatcctgactaacaaggtgaaaccccgtctctactaaaaatacaaaaaattagccgggcgtggtggcgggcgcttgtggtcccagctactcgggaggctgaggcaggagaatggcgtgaacccgggaggtggagcttgcagtgagccaagatggcgccactgcactccagcctgggtgacagagtgagactctgtctcaaaaaaaaaaaaaaaaagattcctaacctctccaattgctcctttgctcctatggatgacattactattataaaacccgatattggccagcatggtggctcacgactgtaatcccaacgctttgagagggtagggtgagtggagcacatgggcccaggagttcgagaccagcttgggcaatatggtgaaaccctgtttttactaaaaaaaaaaaaaaaaaagatgtagctgggcgtggtggcacacatctgtagtcccagatacttgggaggcagagcagggaggatctcctaagcccagggaggctgaggctgcagtgagccatgatcacacactgtactccagcctgggtgatagagtgacagcctgtctcaaaaaaaaaaaaatcctgagattggtatgagatattttttcagatcctgcattctgaggcaccagctggtgccacccagatcagtaaactggctcaactagttctggatgccacccaggaatggaagacagcttcaaccccctatgatttcatccccaacccaaccatcagcattccccactccctagccccctgcccgccaaattatccttaaaaaaccctagtctctgaattttgggggagactgatttgagtaataaactctagtctctcatgtagccacctctacattcattaaactctttctctattgggaaaacctgctgtttgcagtgcatcagcttttctgggtagcgggcaagatgaactcttcaggcagttcactgttcttgagctgggcgctgaatacacaggtgtgttcagttagtacactgacctgcatacttggttgatttgttttctttttcttcttcttttttttttttttttttttgagatggattctcattctatcgcccaggttggagtgcaatggcgcaatctcagctcactgcaacctccgcctcccaggttcaagctattatcctgcttcgggctcctgagtagctgggggctacaggtgcgcaccaccacacctgactaatttttgtattgttagtagacgaggtttcaccatgttggccaggatggtctcaaactcctgacctcaggtgatccacctgcctcagcctctcagagtgatgggattacaggcatgagccaccgagcctggcctgtttgttttcttgagacagagtctcactctgtcacccaggctggagtgcagtggcaccatctcggatcactgcaacctccatctcccgggttcaactgattctcctgtcttagcctcctgagtagcttgattacaggtgtgtgccaccacacccggctaatttttgtatttttagtaaatacagggtttcaccatgttggccagaagtgatcttccccctgccccaccgctgccccccctcccaaagtgctgggatcacacgcatgagccaccacgcctggctgagctgcatacttttgatggtgtgcttttctgtggcatattaagacaaatgaaaacctttaggccggacgtggtggctcatgactgtaatcccagcactttgggaggccgaggtaggcagatcacaaggtcaggagattgagaccatcctggctaacacggtgaaaccctgtctctactaaaaatacaaaaaaaattagccgagtgtggtggcggacgcctgtagtcccagctactggggaggctgaggcaagagaatggcgtgaacccgggaggtggagcttgcagtgagccagcctgggtggcagagcgagactccgtctcaataaaaaaaaaacctttaaggtcaggcacagtggctcatgcctataatcccagcactttgggaggccaaggcgggtgtatcacatgagctcaggagttcaagaccagcctggccaacacagcaaaaccctgtctactaaaaatacaaaaaagttagtcaggcatggtggtgcatgcctgtagtctcagctacttgggaggctgaggcaggaaaatggcttgaacccaggaggcagaggttggttgcagcgagccgagatcacaccactgcactctagcctggcaagagagggagactgtctcaaaaaaaacctttaaaatggtattaaaacatttgattatatatatatatgtgtgtgtgtgtgtgtgtgtatatatatatatataaaactataaatatataaatgtatttttatatatacaaatgttcattaggtattattttcccatagattcatgaatgaatctggaagggaaaactccccatcttttattgttgcctattttttttttcttttactttttgttttctttgagacagggtctcactctgttgcccaggctggttgcagcagcgtgatcacagctcaccacagcctcaactgcctaggctcaaatgatcctcccacctcagccttccgagtagctggaactacaggcatgcgccaccatgccgggctaattttttttatttttagtagagacaaggtatccctatgttgcccaggctggtctcgaactcctgagctcagtcaatcctcctgcctccccctcccaaaatgcattgcgtattctttcttcctagagattgggaacaatacattcatttactttccttttttttttttttttgagacggagtctcactctcttgcccaggctggagtgcagtggcgcgatctcggctcattgcaagctccgtctcccgggttcatgccattctcctgcctcagcctcgggagtagctgggactacaggtgcccgccaccatgcctggctaattttttgtatttttagtagagatggggtttcaccgtgttagccaggatggtctcgatctcctgacctcatgatccgcccaccttggcctcccaaattgctgggattacaggcgtgagccaccgcaccgggcaatacatctactttctaatttgttaccttattaccaagccaccaagcctgcagctctgtctcccttctgatagagcaacgtttctttttttgttttgagacggagttttgctcttgttgcccaggctggagtgcaatagcgtgatcgcagctcactgcaacctccaccttctgggtttaagcgattctcctgcctcagcctccctaacatctgggattacaggcacgagccaccacgcccactaattttgtatttttagtagagacaggatttcgccatgttggccaggctggtttcgaactcctgacctcaggtgatccacccgcctcagcctcccaaagtgttgggattacaggcgtgagccaccatgtccggccacttgtagatactttaaaaaacaagtaggctggccacggtggctcacgcttataatctcagcacttcgggaggccaaagtgggaggattgcttaagcccaggagtttgagaccagcctgggcaacttagtgaaaccctgtctctacaaaaaatgtaaaaatgaacaggttttgtggcctgcacctgtagtcccaactacttgggaggatcgtttgagcacaggaagttgaggctgcactctagcctggggctgtactctagcctaggcaacagagcagagcaaggccctgtctcaaaaacaaacaaacaaacaaacaaaaaacccccaaaaaaccccaaaacctaaaatataacctaaggctcttgtcttctagtcaagacttctttctctcctctaccaccttggcagctagtgatttcctttaatcccattactggtggggaaactgaggtcagaattccagggtagaggctcttgggcccaggcattcgccaggatatggagcaaaccagggtgtctgctacaacgtgagctccccgaaggcaggggcactgtgtcccagctcctggaacagaggccagcaaattgtaggtacttaggaagtatatgctgagtgaataagtgaatgaaggctcaccatccctagaagaagaaagaccactgctggagggaaggggaaaaaagctgtaagtttcaaacagggaaatggatctcatttccagcctttggcagagagtggtacagctgggtgctatgagaaccacatcacttttaatccacatggggctcaggcaggaaaggatcaaaacccaatttgagaacttgagagtcgccctggggctctgtggtttgggaacagtagggtcaatctgaaggctgcaatgtgtcactatttccattacacactttccagggtccccacttggctggtaaactcagagcagattcttctgtcttgaaagatggaaagaggcccagagaggtaaatttttttttttttttgagatggagtctcactgtgtcacccagtctggagtgcaatggtggatctcggctcactgcaacctctgcctcctgggttcaagcgattctcctgcctcagactcctgagtagctgggattacaggcgcacactgccacgcttggctaattttttgtatttttagtagagatggggtttcactgttctccaggctggtctcgaactcctgagctcaggcaatccacccgcctcagcttcccaaagtgctaggataacaggcgctcatgagccactgagcccggcccagaaaaagttttgagaatgctgcttgttgggaacaggggagtcctgcctgccccagactggctggatagtaagaactgttaaagaagttattgattagtcttgccaggcgcggtgcctcatgcctgtaatcccagcactctgggaggcggaggttggtggatcacgaggtcaggagttcgagaccagtctgtccaatatagtgaaaccccatctctgctaaaaattgaaaaaaattagctgggtgtggtggtatgcacctgtaatcccagctacttggaaggctgaagcaggagaatcacgtgaacccaggaggcggaggttgcagtgagctgagatcacgccactgcactcccgcctgggtgacagtgtgagactctatctcaaaaaaaaaaaaaaaaaaaaaagagagagaagttattgattactcctgctaatgggagagaggtattagtgggaaacaccaccctccctctccactaatcccagcagtttcagttaacctgtgggacacattatactgcttctccctgcccctgcccacagggatgttgactgaaccagatttttttgttgtcaaaaaagttcttttggccaggtgtggtggctcatgcctgtaatcccagcactttgggaggccaagccgggtggatcacctgagatcaggagttcaagaccacactggccaacatggtgaccgtctctacccaaaaagacaaaaactagctgggtagtcccagctactcgggaggctgaggcaggagaattgcttgaagccgggaggtggaggttgcagtgagcaccactgcactccagcctgggcgacagagtgagactctgtctcagaaaaaaaaaaaaattaaattaaaaaatatgtgaagtcttctcagaaagattattggataccaaaggtactttctggcttcaggcctgtggcccttggggctgtccttggacaaatgctaggaggtccttggaactcaatgcctgtttataaaagggtggggggtggggggtgggggtgttacagacagcctccaccaggaagcggcctcagcctagccatattatctagaaacttccactgcctgttcctgttactccactccttacccttcaagtgccccagacacaactatatcccctaatgttttctcccctctgattctcccagcctttcaaccccatttcttcccattccaaccccaactaggagcatcctctgtcccctagtctattctccatcatgccctcacttacagctcccattagctcaaggcaaaagctgcttgtccctcccctcccagtcactcgctcccttgggctataaatagcatagctgtgccttagatcgtgttgagagctttaagacttagtcccccttccccccatcccttcccctttaacacaacagggagaacaagcctaaagcttccagttagggtgggcaagcccaagaaggagggggtccgggggaagggaatgagaaaagctgtgctgaattcggaaccacacagaatatggtaactttgccatctgttgtcagggactctccgcttttcccccagcctgctacccattccctgccacttgctcctggaggaagaggagcagcaggagttagcagaattctaacaattctcttttaacccttgcgatcatcctatgggcaggtgctatcttgattttaccaatgaagccaaagactctaagagattaaatggcataacccaatatttagagtggttggtctgtgggctaactgatcccacgtctgacttttgcctatgctaagtctgtccgcatcattgatttaggcccctctaaatcagaatttctattgatgtgacctgatttggaagaaaaagaggtctcctaaacaaattactaatgtagcaatgcataaatggaaaacattaaagactcggcatgttcacaaaaatgatgctatcataattttatcttatctgtttactaaagcaggactctacaaaaatctgttccttgaagttttttttagttactgtatgttctcagaagtttttgaaatacaaagcaattttacttcttctatttcaagatttgccctccactttacattctctcaagttagtcctgagtagtgagttagaagtctggtcttttttctgtcacttactgttgggcaaaacgcttaatggagccccagttttttgcctgtgaagtgcggataataatagcacctacctcattgctatcgtgagaattaatctacacaaaggaggccgggcatggtggctcacgcctatattcccagcactttgggaggccgaggtgggtggatcactttgaggccaggagttcgacaccagcctagccaacagggtgaaaccccatctttactaaaaatacaaaaattagccaggcgtggtggcatgtgcctgtaatcccagctactcaggaagctgaggctggaggatcccttgagcccaagagttcaaggctgcagtgtgctttgattaccaccacactccagcctgggtgacagagtgagactctgtctcaaaacaaaacaaaacaaaaacaaagcaattagcacactgcttggcccatagaaggtgctcagtaaatcacagcaattattattatttctcagctgtgggaattattattattcccacagctgagatgctgtgggaacatcaccatcatttcagtagggagaagctgaacttcactatccgtggtttggctcctgttcttcaaaggacttggagttgatcctgtttcctgccctgtcttatccagacattttcatccccctttttctggcctagaccagtaagggaatataccatccatctcctgagaattcaggccactgctggaacctggagaggcagcaaaggagggtgtgtgtgaaaggctgggaggagagttcccatggacactggggacatgtgaaggccctggggagttgctgtgaccctgggtctctgcctagagcagtgaatgctggggagaaaaaaggacatcatctgccaaacaaatttccagtgctgcagagcccctttaggataaacacacagggctgagtaatctagggaagaaacaaaggcctgggatagagtgggatctccctagcacaccctatctttttccatttgcttagcacatactttttcttctcctaaacaagggtgccaggatatactagcattcctaagcttcagtattcatctggaaagggcttccgtttaaccagccccctggaggttagtattgcagttaggagtgcaaacacttgagccagcctgacctgggttcagatgacaaaactgccatgtactagctgtgtatcctcaggtaagtcattaagcctctctgaagctccattcctttgtgaacaaactgctacttaccatatagaatagctgagagttttgaaatatgctgagtacagggctgggcacagtggcttatgcctgtaatcccagcactttgggaggccgaggtgggcggatcacctgaggtcaggagttggagaccagcctggccaacatgatgaaaccccatctctactaaaaacacaaaaattagctgggcatggtggcaggcgcctgtaatcccagctactcgggaggctgaagcaggacaatcacttgaacccgggaggcagagattgcagtgagctgagatcatgccattgcactccagcctgggcaacaagagtgaaactccgtctcaaaaaaaaaaaaaaaaagaaagaaatatactgagtacagaagagccctaatcctgatcactgtcatccctgcaacctgagtgagcatcaccccataggtagtataaagagttctggaagctgggccctgtagcttccacctttaatcccagtactttgggaggccagttctgagaccagccagggtaacatggtaaaactgtctctaccaaaaatacaaaaatgagccaagtgtggtggtatgtgcccgtggtcccagctatttaggaggctgagatgggagggttgcttgagcctgggagtatgaggctgcagtgagccaagatcacacagcctgggtgacagagggagaccccatctcaaaaacaaaacaaaacaaaaaaccccaaaaactagctgggtgtggtggctcatgcttgtaatcccagcactttgggaggctgagccgggtggatcacaaggtcaggatttcgagaccagcccggccaacatggtgaaaccccgcctctactaaaaataaaaaaattagctgggtatggtggcacatgcctgtaatcccagctactcgggaggctgaggcaggagaatcacttgaacctgggagcggaggttacagtgagccgagatcgtgccactgcactccagcctaggtgacagagcaagactccatctcggaaaaaaaaaaaaatcccaaaccaaaagacagcctagagagtctgtctctcacaactagggtattttatttacatcccacattgttcataagagtatccgagggagtgtaacttgggggacccaggctttctactcatccttgttcctgtatctccatctccgttctcctcatcaagcctgtctctgatccagccacttaattccatgggaattaaaagactgaatctagttaggggctcccctccatttggtctttccttactttccagtgcctggagctttggcttgggactcagcagactgggggttaagaccgatcccctgtcctttcccctcccctctccatccctgacttcaaagttttcataaagcccaagtcactgcttccctgaccccatagtggcagctccatctcagcttttggtcggttcaaaacagcagacgctgagccctggcctggccgcccgttctcctcgttctagccatctcttagggtaagcaccagcatgccaacgacctggggggccaccagtccttgctcctccaggagaggagggctaactaggatagaagctgactcaagggcaggcacagtggttcatgcctgtaatcccagaactttgggaggctgaggtgggcagatcgcctgagaccaggagttcaagattggctgggcgacatggcaaaactgtctctacaaaaaatacaaaaattagctgagcgtggtagcatgcacctgtagtcccagctacttgagaggctgaggtggaaggactgcttgagtctggagggtcaagcttgcagggattgacactgcactccagcctgagtgacaaagtgagaccctgcctaaaaaaaaaaaaaaagaagaaaaagaaaagagagtttgccgtatggttaggcttagaaggtatcccattggacagggcacggtggctcatacctgtaatccctgcactttgggaagccgaggtgggcggatcaagaggtcaggagttcaagaccagcctggctatcagggtaagaccccgtctctactaaaaaaatacaaaaaattagctgggcatggtacacacctgtaatcccagctacttgggaggctgaggcagaattgcttcaaccaggacctgggaggcggaggttgcagtgagccgagatggcaccactgcactccagcctgggctacagagcgaaactccgtctcaaaaaaacaaaaaagggccgggcgcggtggctcacgcctgtaatcccagcactttgggaggccgaggcaggtggatcatgaggtcaggagatcgagaccatcctggctaacaaggtgaaaccccgtctctactaaaaatacaaaaaattagccgggcgcggtggcgggcgcctgtagtcccagctactcgggaggctgaggcaggagaatggcgtgaacccgggaagcggagcttgcagtgagccgagattgcgccactgcagtccgcagtccggcctgggcgacagagcgagactccgtctcaaaaagaaggcatcccattggcagaacccttgtttccagcccagggatgaaggtagccagttggtaattgtgaagaacctgcctggaaagagatggacctggaaaaacaggagcagctcaggaaccagaatgtgttccttagtactcatgtgcaaaatatatgctaaattacatgcaaatcaatgtccaatcattataatctctggcaatttggtaactaatgctgttacactatctggtctaggacatttctggctccctggggccagatcctgctctgtagctcccacaggagaaaccatcacagaccaaaggccagcgggggccccagcactcaaggactgtttctcccaccaccatctgtggacttttccagctgtttttcttggcccaaggatcacacccatagggatgcagatgggggaaggggaagctgagaaagcagtgaagacagaatgagctggggaagaggcagatggtaggaaatggagacggagaaatggcactaatggcccagccacctgagatgggatacctgggagggacatcttttcaagtagaggctgtgttggggcatggtgagagagggtcttagcaggtaaccttcctttcctctccagactgaggaatcagagttctgattgtggagtgcctctctctaggacggggctgcagcataggagtctcagctgcttacatccaggtccaggattatgtctgctaacagacgctggtgggtaccacctgacgacgaagactgtgtgtctgagaagctcctgaggaagactcgggaatctccactggtgcctataggtaagtgaagaaaggaatggggtgccgagtaggaggccttctctgtcatgtctcctggtaccctccaaagagaatgaagcagaggtcagaaaactcaagtggtcctactcacggaacaagggaaacaacagcaaaggtgccaaggggcaaacccttacaatgaaatcaggacgtctggatgggtggaggtggcagccaactgagtacatgggatatgaggaacctggagcaccaacaccaaagtgggaagggtcagaagaacaccttggggtcccccagggcttccttccttatggccctggtagagtaggaaaacagctgtaccaggaggtgggagccagcagtgtggctcaagggcccagggcggagcaaattggtggggaggggctgtgtcgtggtgatcagctatttgtatctgggggaggggcatcactggtggtgatcagctatttgtatatgggggaggggtgtcacgggagggaggcagccactttgaaaatgccattgaagggcaacaactcaatatatatatatatatttttgagatggagtttcactcgttgcccaggctggagtgcaatggcacagtctcggttcaccacaacccctgcctcctgggttcaagtggttctcctgcatcagcctcctgagtagttgggattataggcatgcaccaccacgcccggctaattttgtacttttagtagagactgggtttctccattttggtcaggctggtctcaaactcccaacttcaggtgatccacctgcctcagtctcccaaaagtgctgggattacaggcgtgagccaccatgccccggcaacaactcaatattctaatgatccccctaggtcccccgcaacgcccaccccccgccaccagatgctgcataaaaccagctgtttatccagatgcccagcctgcctggtaaggtatctctcatcaggggagtgctgtgcattgtggctgtggcccaggggctgtgttctctgcccacaggcttaggaggctgcttggtggtagcagcatacaggatttaccggctgaggtctcgtggttccaccaagatgtccatacacctgattcacacccgagtggcagcgcaggcctgtgcagtgggtgcaatcatgctaggtgagtagctttgtggggtcgcagaatgagggcaaaaccgattatgcagtttgtaggtctttaagtcccaacaattaaaaggactgtgcttggctgggcgcggtggttcacgcctgtaatctcaacactttgggaggccaaggcgggcagatcatgaggtctggagagagagaccatcctggccaacatggtgaaaccccatatctactaaaaatacaaaaattagctgggcgtggcggcaggtgcctttagtcccagctactctggaggcttcggcaggagaattgcttgaacctgggaggcggaggctacagtgggctgagatccgccactgcactccagcccgggtgacagagtgagactctgtctcaaaaaaaaaaaaaaaaaaaaaaaaggactgtgaattaagttctcctgttctgggctccacatcacatgcttggtgaagcccctatactgagccatcttccctgtttaggctcctgtcccaggcctgtggggacagtgtctcatgacagtttgccctaggggtgagaaaaatcatgcaacagaacagatgttgaatttctcttcctcttgagattaaaaagcagacagccacttgctaactgtgtgacagtggacaaatctttctcactgagcctcagtttcctgatgtgtaacatgacaataaccacccctggcctgcctaccttgcaggctgctgtgaggtttctcagatacacaatacatgtgaaagtgtttcgtgaactgtcagataagtggtttccccaggttgtgtggtcagatgcttgaagcagctgttgggacctggggcagaaagatgagcgggaagctggactctcaagggagcagctagaggtgaacccctaggacgcctgagagccagaggacgggtgaagggtttgatgccaaggggcattatttcttttctctcacacaggtgctgtgtacacaatgtacagcgattacgtcaagaggatggcacaggatgctggagagaagtaggactcctataggagccggggctgtccaactcccctaactcaatccctggtacattcctaataaagcagttttgaggaaaatcaacagactctttttcactgggggagaacagagtaagggactggtggtagctggggagaggacttggagtaaatggctggaaatcaaagtgctctggccccctactccagggcaaggaagattcttaggggaggcagcagtttcctgaggaggtggtggggtagacttctgatcgcaggaacccaacaactcccaagccatcttaggttccacccagaagcagcatggagtgggagcaagggggcaataatggggccttggcgctcatgggaacactgaattaaaaggcaggcggcttccctggggacccaggcaggaaggaggctgcagctggaagcagaggcagtgaagcctcttgggagatgacatatattcagaatgtaagcaccagacggggcaggggagacgaggatgaaaggagcagagcaagacagaggtcagaatgttctgttcacttgcaaaccatggctaaggtcaaacttgtagaaaataaaattccatgtaaatcccaaagatagggccccttggggtttcatccccttctctttctgtgagcccaagctcctctcttttccttgggaatggagcccggcagaggccacagaaggaagcaggaggccaaatgctcctctctcactggggctctgggttggaggttggtgagttgttcaagatggcaacagcagcttccagacactctctgacaacacgaaggccacgtcatatgaggtctcagcttcaagtacaggagttgcagcccactgtagggagcaggagctcccaggagtccacgcactcacatggggtaattgagcacaacatcctgtttggcaagttccagcaacataggatcatcgaagaatttgctgatgctcacatcttcactgaggccctgcagggaatggggcaaatataagaaagcccgaggtggtcgcagactaagcaaggagactatccaagacctgtgttcagtggggaggctagtggtggctggaatgtaggtggtggtgtttcaggagccctgcctttagggtactatcacatgggaggataaggctctcctttcccaacgagactggggcccaggtttggttgcctaaggagtatacagatcatatctctacattggaaaagtgtcccttaggaaaaggggccaaaagaaagagagagagatcctgcttctgagagtcctggggggttgagggatggcaacaggcccaagggagacataccttcctacggcgggttttgatcatgaattcccgggccaggtgaggagctggctgtggctccaaggggcggatgacaatgctcttgtccaggggatcaccaggcacaatctaaaaggcaaaggaatttcagatggcccaggcagaattcccagaagattcaggcccagaagcaggactcttcttatttattttattcctaaatttattacttattattatttttttgagatggagtttcgctcttgtctcccaggctggagtacaatggcatgatctcggctcaatgcaacctccgcctcccgggttcaagcgattctcctacctcagcctcccaagtagctgggattacaggcatgcaccaccacgcctagctaattttatatttttagtacagatggggtttctgcatgttggtcaagctggtctcgaactcctgacctcaggtgacctgcccgcctcagcctcccaaagtgctgggattacaggtgtgaaccaccatagccggccctattatttctttttttttttttaaactgagagacacagattcaagttgccctgaatatatgctccccagaggaggactcttctccaggatgctgtacacctcacttagggcttggagagggatcaggacagaaggggatgaggcttgcagaggtgggaagccaagtccgccagcctgcattgctttctcacctgccagtggtggaagacagacagagaaaaggcttgtccctgggtgtgagtccggagatcagtctcaaagccaaaagagtcgatggccgggataaaagctttgatggtgtacagaggggagcctgggatgggtgcatcctgagtcacgtgccccctgagacagaaaaacaaaggctgagcctctagtcaaacataggccaaaagccaagaagcaatccagcatttgctgtcccccaaatgcattccagcccagagttaccatcaaagaaagagtaaccaagaatgttctacaaaaagcagaaaaggctcagggctctcagtataattccctgtggaagtcaaagtggcagcaacctctgggcagaggacaggagtgggatggtgaagggacaagggcccaaagacattcccatcactgacttgcctcagcactgcctccaacagctctgtgaggaggggatcccaaaagaaatgtcaattttttttttttgagacagagccttgctctgtcgcccaggctggaatgcagtggcgccatctcggctcactgcaagctccgcctcctgggttcacgccattctcctgactcagcctcccaagtagctgggactacaggcacccgccaccacgcccagctaattttttgtatttttagtagagacggggtttcactgtgttagccaggatggagaaatgtcaaattttaatctgcagaaaagcgggggcttgcctccctccgctcctacttctttctggaaaatcagctctcggggtttccagagagaggagggtagagaaggccaacctctcttccctgtaggagccgaggtgactcttgttctgctcttgctctcagcactctccctaatacgcctggggccgctcacctgcgcctggccaggacggtataaactgcagagacgcaatctgcaggggcctggacctctacaaagtagtaaggctccatcagacgaggagtagcctgcagcagagcaagaagaaaggcccctcagcttggggaaggctgggggcctatagtcccacttgctccttcacttagtcccctgtccagtgaagcagatggtcccctaccgccccattctcttaccatgaggaaggcagagtagacgactctcctggctgtggggatgatctggcccccgccccggtgcaggggctcctgggcaaccaccgcatccaggatcttaaacttgacattccgaatcactgtaaaggaggtggagggagtgactggggagaggttctgggcctgtcatggggccatggcagagtagcagtctcctgcaacactgcagctgtcttgcagtcatgaaagacatggtacagaaatcaaatgggaggtgggcgttctaactgaataagcaaggcccatggcagaggtcagaagttaagcatatgttcttagtgtttgcttcaggccatgctcagacttagagctttcctagaagtttatttccttcttctgcacatatttacatttttgtggatgtagaataaattccagaattgtacatttggtccatgaagcccaatcagggtctataaaccattccaatctcatcatcctcttgatatctcttctcaaatacgtccaacgccaaacccttctcagaaatgaggagcaaatgacagtttagaaatgacttaaatttccatttccaggctacaccaccaggataaggaaggaaaagggaagaagctggcccaggacttgggatggtcctgtgtaccccaagctgcttctcctgccgaatcctaaagatggtgagcccatcccactcatatgcctggctgcaaggaccctcgaggactggggtgggggagtgctggtggacttacattcatcacagagggggccctccctggttccccactggaaaccttgaacgatgctgtccttcactgaaccaagaagagccttgtccacctatagagaaacatgaggcctccttagcagtcgccctggcaacggctgaagcatttagagggagaagacagatgtgcctgtaaggggatactgtccttcaccagaggacacaagatacttttgggaaaagaacactttgtagtttcttccactccagaggtaagagaccgccacccagttcccatcagttctgctgtacctcagagggcagagtatcatccaccagaatgttggggccagtcgcatcagggccaaaagcccagatggaacgggcagccagcagatcccaatcgtacttggtctggaagaactctcccagcttcttcctggggaagggaggagacaatggagctgtcagccagctctgtgattgctggtcctggagccacagaccctcccttcctggaagacagtcacttcatcctacccactgtgcccagaacaagagcaaaggcaaagacataaatgctccccagaaagatgtgtgctcttagagacccggcagttaaactgtggcatccctgcctcctttcgaccctggcgtcagagccctgttctcacctgttccacgtaatctggaccacctcattctctatgtcctctgccaggcccttctcaagaggctcagcaatcatggtgatcttgttcctggtcagaatggaaatgggtggtaaggacggctaacagaacagcagaagaggcattactaagaaaagggtaacaagacggacagctgaggaagtgacatcagtgaaagccacaggggccaagcgtggtggttcagacctgtaatcccagcactttgagaggccaaggcaggaggatcactgaaacccaggaatttgaggctgcagtgagctatggctcacaccactgcactccagtctgggtgatacagcaacatactgcctcttaaaaacaaacagccaggcgcggtggctcacccctgtaatcccggcattttgggaggccgaggtgggcggatcacaaggtcagaagatcgagcctaccctggccaacatggtgaaaccccatctctactaaaatacaaaaaattagctgggcgtggtggcgtgcgctggcacatgcctgtaatcacaactactcaggttgaggcaggggaatcacttgaacccagaaggcggaggttgcagtgagccgagattgtgccactgcactccagcctggcgaccgtgcaagactctgtctcaaaaacaaaacagaacaaaaaaaaaccccagacaaacaaacaaacaaacaaacagaacctgggcaacaaagcaagagaccccatctctataaaaaattagccagccgggtgcgatggctcatgcctgtaatcccaacactttgggaggctgaggcaggcagatcatgagatcaggagttcgagaccagcctggccaacacagtgaaaccccatctctactaaaaatacaaaaattagctgggtgtggtgacactcactccctgtagtcctagctactcgggaggctgaggcaggggaattgcttggacccgggaggcagaggttccagtgagctgagatcgagccactgcactccagcctgggctacagagtgagactctatgtctcaaaagaaaaaaaaaaaaagaaaaacaaacccaggtgtggttagcacacctgtagtcccagctacttgggaggctaactaaggtaggaggatcgcttgagctcggaaggttgaggctgcagtgacccatggtggcaccactgtactccagcctgggtgacgaagtgagaccctgtctcaaaaaaaaaaaaaaaaaaaaaaaagccacagtatcaggggcaaggtggagcaaaaagggcaaagggctcatctttctttcatttcaatctactggtctttatgaaagtaaggtttaagctgggcgtggtggctcatgcctgtaatcccagcattttgggaggccgaggcgggcggactgcctgaggtcaggggttcgagaccagcctgggcaacatggcgaaaccccacctctactaaaaatacaaaaaattagccaggtgtggtggtgcgtgcatgtaatccctgctactggggaagctgaggcacaagaattgcttgaacctgggaggcaggggctacagtgaggcgagatcgtgccactgtactccagcctgggcgacagagcgagactgtcttaaaaaaaagaaaaaaaaagtaaggtttaagctgggcatggtggctcacacctgtaatcccaacaatttgggaggccaagatgggaggaacacttgagcccaaaagtccaagaccagtctggacaacaaaaaataaaaaaattaacagatggcctggtgtgtgcccatagtcctagctgcttgggaggattgcttaagcccagaaagttgaggctgcactccagcctgtgtcaaaaaaaaaaaaaacaaaaaaacaaaaagtgagtaagatttggagtaaacttttaagatagtcattttatagagacaaagtggcagttatgaaactcctcttgggaatacccaaggcgaataatcccatgtcattgtgttcaaaggcagaagggctgagagggctggagtgaaactcaagtattgtaagcaccccctattctgagctgtagaggtctctatgtgcatagtgctcatggtgggggtagaggtggaagataaaggagagagagtgtccaggaggctgcagtcccagggacactgtgctcccagcttacttcttattaggcgtttcagcaaagcacttgagggaggatgtttccaccaccgtctcacaaaacgtgacaactgggtcagccacctgggaaacagaaaataaattactgaagcgaggtctaattttgttggaagggcaaccatttacctaagggaattcagaagctcccttgacactacctctgtgaaaaccccaactgccttaatcagcacaagtgataagtacaacagcaggttaaaagagctgtccaaatcatcaccaaaaagcccaagaaaacttactgtagtaaagaaattagattcctgagccaagagtaagtggggtatcaaactagggccttaattctagtcttcaaaggtagctctcagcatccattcagccatctaccaccattcactgaacaacccccatgggtctgacagagctggtgctgagacccactggcgtgcacccatgtcattctcaacccacagcatctgagtgaagctctgccctgaagccccaacatggtctgctgcccaggaaacccagtgttttctatgacaccaatccttcctccttcctagatacatcagtagaggagtctaagaggggtattgagggtcctccacagggccttggagaaaatacgactcaactaggacaaggaggccaagcaacacatggtttgaggggctacatcaaggcttgacaaagaatctgggagagacagtccccaccctctccttgaaaccacccactctgagacctaatcaccacccatgggttaattgtttaattgtgcaattatttccctaacaaaggaccaagaataactttggcttgggagcctttattttctttttcctttttttttttttttttttgagacagagtctcgccctatcacccaggctggagtgcaatggtgcgatcttggctcactgcaacctctgccacccggtttcaaacaattatcctgtctcagcctcctgagtagctgggattacaggtgcccgccaccatgtctggctaatttttgtatttttagtagagacagagtttcaccatgttggtcaggctggtcttgaactcctgacctcaagcaatccaaccgccttggactttcaaagtgttggggttacaggcgtgagccaccgtgctcggcctgttttattatttttcaatgcatttattttttgagacagggtcttgctctgtcacccatgctagggtgcagtggcatgatcgtagctcactgcagcctcgaactgctgggctcaagcaatcctcctgcttcagcctgcggagtagctgggactataggtgcaagccaccacacctgactaatttttattttttagttttttgagacagggtatgactccatctcaaaaaggagagcaatggcacaatgattgctcattgcagccatgacctcctaggctcaggttggagagcaatggcacaatcacagttcattgcagccttgacagtctaggttcaggtgatcctcccacctaagccccccagtagctggactacaggtacatgccactgcactgggctggtttgtagagacgaggtttcactatgttgcccagattggtctcaaactgggctcaagcaatcctctcacctcagtctcccaaagtgctgcaattacagcaacggaccaccatgcccggcctggctattttttttattttaatttttgtagaggcagtgtctcactttgttgctcaggttggtcttgaattcctggctacaagcaatcctcccacctcggcctcccaaagtgctgggagtgagccaccaagcacggctgagccttgattttaaacgtatgacacagcagaagggggcaaaccagttctcaaaaaccttcccatataaggagcaacagatcatggttttcacaaacacatgtactctctcttcccttggagcttcccaggaattcaaggatttggtcacttgtgaaaagtctggaccgtgaacccagctcccggcagatactgctgtaccttgatgtctatctctgagtacatcttccgcaaatcatgcatcacacagtccaggtagagctccccagtgcccaggatcacatgctcgccagactcctccacctgaaacacaacaggcagtcacagcctggattctcttatgccagcaaaggcacacacaaacaaaatcaaggccagagcagacaagaagttgcctatcagaaacagctactacttagcatctgttccagcctcttcaagaaggttcagtgaggagcatctgcctatgagtgggtcctcaagacaccaggaccactcagcatggtgatactaggtgtgaagtcaatgatttaattcccatcttaatgatttaggtcaaactctaccctatacccatggacataagctagccctttagccctcctggcctgctacctggaaaggtacactggcaggctcatagtgtacaaggatcagagtaacaactcacttttccttctcttctcgagaaaatcaattcaaagtatactcattaagaaatgtatttttgtctagataaagacatctgcggaacacaaatacgcacacacacacacacacacaaccttgtcctataccccccatcactgccccctcctacacaggtcttgttttaacacacacacatacacacacacacgtgtcttgtcctgccttgacatgacagccataggctgggcttgctcctgacacagcttcctgtaagcagcagatcatgaacacctgatggatgggaagcggtgtgcagctctgcccattcagctggggatagtggggcttggcggctgctgcaggccatgggcataccttggtggtgagggatggatagctcttgttgaccttgcgcaggccatcaagcatcttgggcagctctgaggggttgactggctccacagcaatcttgataacagatgtggtattgaacttcaagggtcggaaaatctgagcctgagatccaaagcacaaaggactgagggcaactggcatgagcaggcacagaaagtgcagaggtatgagaagagaagaggacttgcttaggatcagactatgtattccccaaccaggagcctggtgctgagtgggggtaacctgaagggccatttcttcccaggtattctggcagaacaaagagaggaggaaaataataaaaggcacccgtcctaattcctcgcatctgaactgagtacagggagaatccagcagggtcatatctagaaggctaagcctgaaaccaggacatggcaatgactgtggattagtcccgtttgtgctcatgtgtgtccctgggaccatctagcttaagccaacccagttggtctcttcagaaactctacctcctcattgcctcggggttcggttatggttgctgtcttcacaattggttgatcaacaccttcaatcagaacccagttgccagcaggaacacggttcacctcgatgtggtacctgaagcaatgtccaataagcagcagtgaaacttaggcagagcattccctaattttttttttttttttttttttgagacaggatctcactttgttaccaggctggagtgcagtggcacaatcttggctcactgcagcctcgaacttccaaggttccagtgatccttctgcgtcagccccccaagtagctgggactacaggcacacactaacatgcccaactaatttttgtatttttgtagagacggggttttttcatgttgtctaggctggtcttgaactcctgagctcaagcaatcctcctgcctcagccttccaaagtgctaggattacaggtgtgagccaccacatccagcctattccacaaaaatttactgagtacttgctgcgtgccaagagcaggggtgagcaaaacagatacattctagcaggggagagatacagtaaacaatcattatccacacatgtatgtggttacaaactgatgggcattatgaaagaaaagtacaaggtatttctgtgaggacataagaggaaaatcttattccaattgcaggctcatggtaaaaagctgcccaaggtgtcgactgtaaggggctagcaaaagcatcaaagaaggccgggtgtggcggctcacgcttataatcccagtgctttgggaggctgaggtgggtggctggatcacctgaggtcaggagtttgagaccagcctggccaacatggtgaaaactatctctactaaaaatacaaaaaattagccagacatggtggtgcacacctataaccctggctacttgggaggctgaggcaggagaatcgcttgaacccgggaggcagaggttgcagtgagccgcaatcacgccattgcactccagcctggctgacagagagaaaaaaaaaaaaaaaaaaaggctgggagcggtggctcacacctataatcccagcactttgggaggctgaggcaggtggatcatgaggtcaggagatcgagaccattctggctaatacggtgaaacctgtctctactaaaaatacaaaaaaattagctgggcatggtggcgggcgcctgtagtcccagctacttgggaggctgaggcagcagaatggcatgaacccaggaggtggagcttgcagtaagccgagatcacaggcactgcactccaggttgggcgacagagtgagactccatctcaaaaaaaaaagcatcacagaaaacttccactttcccagctcttcaatattccaccttttggcatttagggtggatttaacaaaagggaccaccattgaggcagggtagccaccttagggaacacgaatgctttggtttaacttgtcaactgggaaaccaaattcataaactgacaagtagcccagaggcccaagctaagtttgactgcagattgggatgctacaagggatccagcgaagccttctctcttggtcaaagagtagacagtggagttggggaacaatttcttttgggaagaaacacaaagattatgacttaaggaacacaggagaggaaatgaaaagaggattaagatgagtaacaatggaaatcctcctacaaaagttcatacaagcttcatgctttcaaaagggctttaagatggtgtgtggtggctcacacctgtaatccaacacttttgagaggctgaggtgggaggatcacttgagcccaggagttggagaccagcctgggcaatatagtgagacattgtctctacaaaaaatttaaaaattagccagacatagtggtgtgtgcttgtagttccagctactcaggaggctgaggtggaaggactgcttgagcccaggaggcggaggtcgcagtgagctgagattgtgccactgcactctggcctaggagacagagtgagaccctgtctcaaaacaaacaaatagggctaaaaaaaaaagttcacacgagccacccaaagtgcaaaggcgaagcttctggcactgttccaacagtagctgcctttggccccagcaaacctgggacaggaagaacttgaagtcaatagccctgcggagggagagccactttatcccctcttgcacagagccttgcaactacttccaaggaggatcactccttccagctccttgggggcagcccctggatagacaccaaggcatactcctggggctctggttggcagtacctggccacagagatccaaaggcggcccacggtgcatatctgggagtcttcctcatcctccagggtgtagttctcccccagtaccttcacaggctgcccagcatgaatggtgccactcagcacccggccaaaggcgtgaaactggactccatcatctgtgctgtacatcttagtagtgtggcacatcagggggccctggaagaggggacagggtgcagcttcaaccacatctatgctccggggaagtactactccccgccatcttccttgacagcaaggacatgagctctatgaggagctagagaaagatgaggtagtctcatctccaaaccatgttctaccccatccctctgagaaggatgaataggagacatggcagagcaaaaatattctcctctttttttttttttgggaggataagggcattgaggaagagacacagatttaagatagcagagaggcactattggcaagattacttactgtcccaaatttcctcttaagatgtaactcaattctcaactggctgtgtatttatgataagaaactagacagcctaagaaatggctgggaaagatgtttttaaaagccaggactgacaagattagctaccatttgttgaatctttagtatctgccaggcaacatgctgaacacaaccgtaacacttccttaatcttatttaaatctcataacaaccgctcacattttattatgctcgtgttatagaccaaggccttgaggctcaggaaatgtgagtaatgttcccaaggtcatagcactagcggtggcaacatcaggctttgcattcaggcctgactgtgctcatggggatggggaggcaagggtgggaaagtgggcattactcctgtgaccagaaatcagtatccccacacaggaaggggaaaaaaagaccagagaaccggggagccacatgcccttacatcagggtcacagtcactcatagcctcgccgaggtcggagtccacaccaccggtgtaggtgtgctcaatcttgggcttggcgcccacctttggagaagggatatgctgcacacacatgtccacaaagcctgtggatggagaagagaaagccattaatacatgccttcccagggagcacgagcaggagttactgagccattcacaatggtcaaaaagctcaaagtgcggggactgattgttagctctaaaagctctggcactatagatagtgatagcctgcttcctgggaatgtgctgctagaagatttggagtcaccctgatgccagaaaagagcaagcagcaggtatcagtggtacatggttccttggaactcagctgacaaaaagtttaaagtacatcgatctatgaacttttattggctatacgcatttacgtggaacaaaataagcaccccatctaacatctacttaaaacaattcccaacctgactccccttgagaaacactgcatgcatctctattcaataagttaccccgttttctgaacacattaataaaccacataagagggaacccccatgagcacactgggataggcctgtgtgccttcaatggtatctggtgtgtcagattgatgggcagaccaaaataagctattaaaactacgcaccttgggggcccagacacctaattcccaccggacttagaatcagagactgctgagaagaccctcagccatcaccctttccacttccctgattttacagataacaaatcagagtcatgaagaattaggtggctggcccagggtcatctcatggaatggccagggcaggatcgagacagactcaggtggttttttcaaccagtccagtgtctttctgctgtatcacgtgccttctgtgtaactaaccaagtctcccaagtcctagcctagtgctttttgcactatttcacactacccaagcatccaccttcccggctgccccctggaaaatataccagaaccacagagcctgcctccccatctcatttacttgaacactcctcctggcaggaaaatgtaattccttttggttcccaagatagaatgtgtgccatcatccactaaggaaagcagctaggaaaaacaccagtgttctgcatctgaatctgtggtttgttgaaaagatcctcagatttctgacctccatcgctgggtgagaaaaaattgctgtgatacctgtggcagggcacgaggatgacagagttaaggggccacgagcacattattacctgtgaactcgccaaagaactttttgcagaccagcctgagcaaggggcggatgttcagcttcagctcctccttcgtcaggtggatgccaagctcgtctagggtccgtgggaggctggtgtccacgtcacctacaacctgtgagggtgtaagacaccatgtcagctgtagtgagagcctgagcatggtgctagagggagacaagggaagtccaaagaaatatctgaagaactccttcacaaggctctcttctatggagacaaagctcttggcaaggacaaaagtttggtttcagcggcatctctgctacctacccttcaaaccacaggcaaagccaacttggttacatccccatcccagccaataaaccaagcactcagattgattactcccagtgctgccccctggtgtctgaaaagcagcatctcctcccactcagaaactccctcacctattaaacagaagtctatttacagacttctcagatttagaggatcattgtgcactggaaggaaccaaaaaaggtcaccttgctgtggatcctgtcagggcagggccaagctaaatcaccctcagtagactcaaggtctctactgaggcaggctctataaattttttttattaatccattccagtctgacataagatactaagtatttttcagcactaataaattttaattgctattttatcttgttgctaggttttgctgttttgtccaccggaatggccacacacattttgtgtatgtgtgtgtccactgtgcttattaaatacctgcatattttattactgccttgggagaaaggtctgtatgaaaattcctataatttttacccttttagtcccatcttttagggagtacaaattcatataaacgtcatgctatattcccttttttagagacagggtctcactctgtcacccagcctggagtgcagtggtgtgatcacggctcactgcaacctccacctcctgggctcaagtgatcctcctgcctcagccccccaagtagttgggaccacaggcacacaccactacaacagctaattctattttgtgcggagataaagggtttagccatgttgtccaagctggtcttgaactcctgatctcaagcgatctgcccactgggacctcccaaagtgctggaattacaggcgtgagcaaccacatccggccacgttatattctttgcttctcagcattccacatgcttaattaaatccttaccatctcctgacaaatgatttcaatctgacaagcatcacatattgtgcaaacagttaagaaagcaaagttcatacgaacatgctttgttttgtttttttctgagacagggtctcactccatcactcaggctggaatgcagtggtgtgtgatcatggatcactgcagctttgaccaccagggttcaagcaatcctctggcctcagcctcctgagtagctgggaccacaagtgcacaccaccagtcccagttgatttattttattttttttgagacggagtcttgctctgtcacccaggctggagtgcagtggcacaatctcagctcactgcagcctctgcctcaagagtagctgggattacaagcatgagccaccacgcctggctaatttttgtatttttagtagaaatggggtcttgccatgttgcccaggctggtcttgaactcctggactcaagtgatcctcccgccttggcctcccaaagcgtctggattacaggcctgagccactgtgcccagctcagacatactttaagtggttgcaaagcggttcattttatgggatgtaccatcactcatttaatcagattaatgagcataactgacaaacatttaacttatttccagttttttcccttttcctgatgttacaaacaatgctataagctgaggtggtggactcctgcctgtaagcccagcactttgggaggccaaggcaggaggatcacttgaggctacaagtttgagaccagcttggggataatggcaagaccctgtctctacacaaaattttttaaaagttagccaggcatggtagcttgcacctgcagtcccagcttctcaggaggctgaggtgggaggattgctcaaacctaggagtttgaagctgcagtgagctatgatcgtgctattgcactcccacctgggcgacagagtgggaccctatctctaaaaatgctataataaacactttgacttatatgaataagcaggaggactttcacaattatatctgtaagttaaatttccgtaactgaaatgattagttctaagtgtcacattcttctcaatagtcaagatctgttcataaacctgctctaggagaagtcttttctttcataccttttccctttcctttgatttttttttttttttttttggtgacagagtctcgctctgtcgcccaggctggagtgcagtggtgcaatctcggctcactgcaacctctgcctcctgagttcaagcaattctcttgccttagcctcccgagtagctgggactacaggcgcccgccaccatgcccagctaattttttgtattttggtggagacggggtttcatcgtgttgcctaggctggtctcaagctcctgagctcaggcaatctgcccacctcggcctcccaaagtgctaggattacaggcatgagccaccatgcccgggcccctttcctttgattttaataacacttagagtaatgtagtgttctggatccagaagattacttctggaacaattagtgaccaacaaccacccttatacttgacataaaactgagcaggtttagggacagagggaagtgtgagttcaccagctcttccacactgtgcttataagagcagatctgcccagtgtgacctgacacactcacctgggcgaggatcttataaagaggctccaagataaactccacgaaacttctctgggagctgctagttggggcctttttggtgaactttcgcctaaaaggaaaaataagttctgagtgacccaggggaaaaggcactatcactgatcccaagaggcattgtctaagtgctgaatctgaacaacagcccaggggaggaatgtgtgtgtgactgtaaagtttccagagacagattcctggaaggatacatggttatgaccctcctggatgcctgagctgggctgtaaagacttcaggagaaacagcttctcaccagatcagagcttaggaagccaacccatttaggggaggaaagacggtagtttacattaaaaaaaaaaaaaaaagtaggtatttaatctttgaactcagagaatttcactgtcctcacttactgggtaaatgatcacccctctggaaagtcacgtcccatactctacttacgtcttagggttgaagtagatgtcaccccagagtcttttagcaaattcttggtaattaatgtcacctatgggagaagccacacaattataatctacctagcaaagtgtcgttcaaaattctgtttcaggtgccacaggtggttcatagctgagaacttctagcactttcctttccagggtccaggcagttccttctaaccagagaggaaaacgaggacactgaggcacaaagaaggacaagactggtccaaagttgacaaggctgtgctggagccaaaatgagaacccaagcctctccatctccaccaagcactaggattgaactatggacaagagcatgggttacatgttttccttcgatggaacagggtcacctactgtgtggcatcctctatctgcatctaaaccctgtcccttctggaaggggaatttaatggttctttcaccctttcctgatgtagacaagctcgactctgctgccagtgtgggccaccttccaactgcagtgtcaccataaggttctggctagccctaggcctcaggtaagcaattactcagccctctcgagagaaaacaccaaagccaacctttggctcatctttcaccaattaatatttttagtttgactataactgctaatcctggtcagactgtaccaaacaaccatagcttttaaaagtcaagacgttgggtgacatccaattagataactgatagcaccaaccacctcctggatatttctacccagatgtcagactgtcccctcaccttgtatgggataaagggaatgcactggcttttcccgaaagtcacattccccttcagacttctctgtctccatcagtaaggttaccaccaaattttcagctaaactcaaaatctttttcttccctactctgttaattaccaaattctccccttctttcccacattgttagttactgaaactttccttcctctgaaccactgaatgtttatgccctctgttaatgcacttaccatgcagtataatcactgaactttttttctttgagatggggtcttgctttgtcatccacactggagtgcagtggcataaccttggctccctgcagcctcgaccttcctggctcatgcaatccccccacctctgcctcccgagtagctgggactacaggtgtgcgccatcacggccagctaatttttaaaattttttgtagagacgaggtcttgccatgttgcctaggctggttttgaactcctggcctcaagtgatcctctactttggcctccccaagtgctcggattacaggcatgagccactggacctagcctgaacttgaactcttctccttggttaaacattccactgttacctgaacaggccatgactaacaccacctgcctctatgcctctttctccagccctgcaagtctggaattcttggctttctactctttatttgcccaagccccatctctttccctcggctttacctgactccaagccattgaggctgagccctaccccacccctaaattctctcagctgtatctgcctacagcactcagctcacactatcacctcacattgccattcatcactctgtgggattctgttcgtccactggatgaagtttatagaagtccgaagttgttcatgatgccttattgtattatattcctagcgagagcacatggtatcagttttggtagtaaggtgtaaatggattctagttcctactctattagtaatttctgtgaccatgggcatagtttcccctcatgtaaaatgaagaggacgactcaatgatctcttcaatattcccttcagtgctgactttacagaagtctacacatggctttccatgataacgctgctgcagcccagcccatagctagctctggcataaactaacagtgggttcaaaggatgaacaacaatctcgcccaaggctgaggatcattttcaatcaaaattggaatcatctctgcattataattacaaaagggttttggattttgcttcacatgctcatacaatggacatttagaaacacaaacttctactggaaccctgttcagtttaatttcatttattgtttagctacccatttttaaaaaagagccatctggaaataactgatatatacatctaataacaagaaaatggtcaatggcccaatgctgtgtgaaaaacacagattacatatgtatacagttgacccttgaataacatggtttgaatgtctcggttccaattatacatggatttttctcctgcctctgccacctgagacaccaagaccaatgctttctcttccttagcctgctcaatgtgaagatgacgaagatgaagacctttatgatgatccacttccacttaatgaacagtaaatgtgttttttctcatgattttctttgtaacatcttcttttctccagcttactttattatgagaacatagtacacaggccaggcacagtggctcatgcctgtaatcccagcactttgagaggccgaggtgggcggatcacgaggtcaggagttcgagaccagcctgaccaacatggtgaaaccccatctctactaaaaatacaaaaattagctgggcatggtggcatgtacctgtaatcccagctactcaggaggctgaggcaggagaatcacttaaacccaggaggtggaggttgcagtgagccgagatcgtgccattacactccagcctaggcaacagagtgagattatgtctcaaaaaaaaaagaaaaagaaccaaatttttcttgttttttgagacagggtcttgctctgttgcccgggctggagtgcaatggtgcaatcacggctcactgtagcctcaacctcccgggctcaagtgatcctcccgagctcagactacaggccagtgccatcatgcccacctaattttttgtatttttttgtagagatggggtttcgccatgttgcccaggctggtctcaaactactgggctcaagtgatccgcctgcctcagcttcccaaagtcctgggattacaggcgtgagccactgcacctggtcaaaaaagactgaacttcaattttttttttttttgagatggagtcttgctctgtcgcccaggctggagtgcagtggcgtgatctcagctcactgcaagctctgcctcctgggttcacgccattttcctgcctcagactcccagtagctgggactacacgtgcccgccaccacgcctggctaatttttttgcatttttagtagagacgggatttcaccgtgttagccaggatggtcttgatctcccgacctcgtgatctgcctgcctcagcctcccagagtgctgggattacaggcgtgagccaccgcgcctggccaaaaaagactgaactttaatccctcatttttttttcacaagagcaaagggctccatgctaagagtgcggcaggacaactgactggcaagaatagaaacgctgatgctccaccgcctactggtcatgagacatctcacggagcctgtctgctcgactctaagaacggggtaacagtgacttccctctaaggaactgcaacattgaacacagaaaagactctcagtgcacgattcctattggaatctgaggtaactggggaagtgcaaagatgaagagccagggagtctctcacagtgggaatctggtctcaaggatctggtgttgaggctccaggaacccatgatatcatgcggctgggcatgttagcagaggcctgtagatgctggctgcaaggtcaccatgagttctcaattagacccatgaaattgatgtctgcctccatacggctggctagaagcactaacagtgagggagatgccacctgtgagaaggtctgaaagtgcctgtgggcatggatgattcctgttttacaaaacctgtctcactctaggagagacttttattcctaaaatgacctccttcttctcccatgtcctcctattcacttttatttttctattatttagaaaccacttagcctgaagaaagggtctcaaggccacaaagacccccaaatgtgataataacaggtgataaaatgttcccccagcagggtgctgatacgaagccaatttctgagtcattcagcaggaaaggcacacaggactcaggggaagctggtgagacagactgccagccagcgcttaccaaaggtgtcggcatagatcttggcaaaggagcccagcgtgaagcagatgctgtactgggagctggagaagcagacgttacccaggagtggggaaaggatcaggttctcatcagtggaatacatgctgaaacagagacagtggtgaacacagtgccaggctgcagcagcccggacgcactgccaaggggaagggcaggaactcggtatcacagccactctccagccctcggaagggacttgtgcaagacactcagttttgccaacagcctggtccaagaaagtgacatgatggagctgttcccctaattcccaataacaagttgatttcccagagctgggaacattctgcacaatcttggaaaagttaactgcaccagacagacaaggggaaacctacaggacagagacaaaaaccttagaacacaggaaatgaatctaatgtgataagacagaaatacatttgacgaaaaacctcaatttcacaaatacaagcagacataaacatcatttaaaaaagagaaaagaaaggaaatgaagaaaagcaactctgctctttaccctcactgccatactctttattcttttgtgtttggcttttacagtgttaaaactttcaatcttaaaagccatgcagaaaccacgagcatctgagttcactaacatttataagaaaacgagttgtacaaggggatcaaatccacaaccctagccttactggcacattatcttatggaatgtcccaatatagaaataaaggtatggcttataaagaacagccctctaccccattgcactctacccccaagttatgctccctagaggcaactgctttcaacacttttaaagctgcttttagagtatttaccttcaggtttctaagtaatatgtttatgttactttttcttgcttagaggttcttttgcttttgagacagggtcttgccttgttgcccaggctggagcacagtggtacaatcaccattcactgtagcctcgatctctcaagctcacgcaatcctccctcctcagcatcccaagtagctgggactgcaggcatgaaccaccaagcctggctaatttttgtagagatgagatacaaaagccatgttgcccaggcttgaaccttgaactcttgggctcaagcaatatcctgcttggcctcccaaagtgctgggattctaggtataagccactgtgcctggcctcttgtttagaggtttgaaacatgacctcttgacttcctattttagtaaatcaggttaagttcagctctatcccacttcctactttttttttttttttttgagatggagtcttgctctgttgcccaggctggagtgccgtggtgcaatctcagctcactgcaagctccgtctcccgggttcacgccattctcctgcctcagcctcctcagtagctgggattacaggcgcccgccaccaagcccggctaattttttttgtattttttagtagagatggggtttcaccgtgttagccaggatggtctcgatctcctgacctcatgatccgcccgcctcggcctcccaaagtgctgagattacaggcgtgagccaccgtgcccggcctcttttttttttttttttttttttaagagacaggatctcactctgtcacccacattggagtacaacagcacaatcatagctcactataaccctgaactccttggctcaagtgatcctcttgcctctgcctcccgagtagctaagactacaaacacatgccagcacgccaagctaatttcaaaattattttttgtagacacagagtctagctatgttgcccaggctggccttgaactcctagccccaagggatcctcctgccttgacctctcaaagtgctgggattacaggcataagctatcacgcttggccttcttattaaaatatatttgtcatttcatcctttggactcatgatgtcacactgggctctagtcattctcagtccttgcagagatggggtgaagatattccttttgaaaagtagtgctacacactgggaaggctcctgaaggtatctgtctctagccacacaggttccatccccaatccttaaatggagaggcattctttcagttggagaggcattctttcagtaggacggcctcctcacaggcccatttgaggggctgcaggaagtcatctagcacatctttcagcctgtagtaagactgtctttaagatatatttaacctctgtttcaaaggccctttgatattatattctaaggtatcataaccatcactcatatgtatcaatgcaagccctaaatccatcttgttgagaagcaggtatatccacagaaacacagcaaacagttcttaatttatttagactgtgttaattataagataatagcagctaacattattcagcacatcagctgctacattgcaagcactgtgctgtgttccatcaaatatctatttaatttcttataacatcccttgtaagttatgttaacttatactataaatgcctaataatatttgctactattgctgttaggcaaatattattccttttttactgaagcagaaactgaacttaagtaatctgcccaactttacatggttggtatgtggtgaagaggaggctgattctagagcccaggctgggtgcagcggctcaaatctgtaatgctagcactttggaaggccaaggtggaagaattgcttgaggccagtttaagaccagcctgggcaacatagcaagactccatctctacaaaaaaaatataaataaataaaaaataaaaattaaaattaaaaaaaattggccgggggtggtggttcacgcctgtaatcccagcactttgggaggccgaggtgggcggatcacgagctcagaaggtcaagaccaacctggctaacacagtgaaaccctgtctctactaaaaatacaaaaaattagccgggcgtggtgacgggtgcctgtagtcccggctacttgagaggctgaggcaggagaatggcatgaacccgggaggcggagcttgcagtgagccgagatcatgccactgcactccagcctgggcgacagagcgagactccgtctcaaaaaaaaataaattaattaatttaaaaaatatatagccaggtatggtggcacatgcctgtggtcccagctatcaggagactgaggtgggaggattgcttgagcccagaagttcgaggctgcagtgagctgtgattgtgacactgcactctagcttgggtaacagagatcctatctctaaaaagagaagaaattaatacagcccaagtactgatcataatagtaaaatgaagatgtgttaaagtatgaagtcaacccctgcagagtcccaggatgtgcctctagttttgcccaacaaactcatcaacacacgcttagaaataaatcacagttgttcccagaggtattcagggttaaaacccagagcctccgaggacaggaaatccactcccaggggttttctaccttattaatccattgacctcatccacaatgtggcgcagcttgtaataagcatcagttggaggcagcttcagctccaggatcagccggtcaatcttgttgatgcacacagtgactgccagcctctcctgcaccgcatgcttgatcagccgctctgtgttcagcatcacctgagaaaaacaaggctcagaaggtggtaagaagaacaaggagggcagaaagttcaaagcagaaccaaagaaggcactatttcaaaccatgaagcctggggagaaaaaaagacctcgggaaatattactgggtggaagcagagagcatcctgcccgaagatagacacaggaactttaagagggcaccttgcaggattgagaaatgaataaacccatgaacaatgatgttgggagccaggtttctcagtgctaaagaaggaactaagaaggctgggaagagccagtggtgctgaaatggaattgggggtattaggattaatgcatgatttttaatatatgtgtgtagaaatagttatagatatgtatgagtgtatataacctagctgtgctcagtgagagggcctagaagcaatgtaccccagtagcaatgagcacatccaaacctttgtttctaaatactaatccccactggccgggcacagtggctcatgcctgtaattccagcactttgggaggctgaggtgggcgaatcacgaggtcaggagatcgagaccatcctggctaacacggtgaaaccctgtctcgactaaaaatacaaaaagatgagctgggcgtggtggcaggcacctgtagtcccagctacttgggaggctgaggcaggagaatggcgtgaacccgggaggcagagcttgcagtgagccaagatcgcaccactgcactccagcctgctgggcgacagagtgagactccgtctcaaaaaaaaaaaaaaaaaaaaaaaaaactactccccactatgagccagagctgctaggctaggtgcagtcactcacacctgtaatcccagcattttggggaggccaaggcaggaggattgcttgaagccagaagttcaagaccatccccggcaacagagcgagaccccatctctcaaaaaaatatttaaaaataagctgggcatgttggcacatacctgtagtcccagctatttgggaggctgaagtgagtgaatcacttgagcccaggagctcgaggctgctgtgaggtataattgtaccattgcactccagcctgggccagagggcaagatgccatctctttgaaggaaaaaaaaaaagccagagctccttgaagaaatggctgagtccaggattgggacaaggaaagataacgtctagaacatctttttgtgcttgaaagtaaggaagtgctcaaaaaacgatgaggcgtgaaaaagatgatggaatcagcctgaaggagctctcagtagccaaatctgggacaagagcactagagcaccggaatccataaggacagtaacagattataactcactgaataaaatgcaaacccaaatatccacagtgataataagcaaatgggggagaaacaaaagcacttctttacaacataattccaaccaataggccaggcgcagtggctcatgcctgtaatcccagcactttgggaggccgaggcaggtggactacttgaggtcaggagttcaagaccagcctgaccgacatggtgaaaccccatttctacaaaaaattcaaaaattagccaggtgtggtggcaggcgcctgtagtcccagctgcctgggaggctgaggcaggagaatcacttgaacctgggaggcagaggttgcagtgagccaagattgcgccactgcactccagcctgggcggaagagcaagactccatctcaaaaaaacaaaacaacaacaacaacaacaacaacaaacaacaatggctggaagcggtggctcacgcctgtaatctccacactttgggaggcctaggtgggcagatcacttgaggtcaggagttcgagaccagcctggccaacatggtgaatgaaaccctgtctctactaaaaatacaaaaattatccaggtgtggtggcgtgcacctgtaatctcagctatttgggaggctgagacaggagaattgcttgaacccaaaaggcagaggttgcagtaaactgagatcgcaccacttcactccagcctgggcaacagagcaagactccatctcaaaaccaaaacaaaacagaaggaataagaagagttagaagactcactatttgcaactattgtaggaacaagccaagaatcatcaatagatgacaaaactagtagataaagtttgataaggagaagaataaccagattctaataaccagagcttaatcacgaggaagtattagacaaacccaaattgaaagacattctacaaaataagtgccctgtactcttcaaaagtgtcaatgtcataaaagaccaagagaggctaaagaacagcttcaattcagagagacttgaaaatcatgaaaactaaatgttatgcatcactctggattaggggaaaaaattctataacggaaattgttggtatgattaataaaactgaataaggtctgcaaaaaaagatctgtacaacaggactgtatcaatgtcaaattttctgattttggcaactgtactgtggttacataggtgaatgtccttattcttagaaaatacattctgaaatattttactttcaaacagttcaaggggaaaatgtacacacctgtctctctgtgtgtgtctgaacgtgtacagagagagaattacgaagtaaatgagggtgggttctttgaacaattcttgaagcttttcagtttgctgctattccaaaatgaaaagtcagtttaaaaaaagacaattctggctccctctgctggctgtctcaccaatgataacacgaataaggttagccaaagtgttccatctctcaattgaggaatacagaagacaccctggtattttaactccaatctcttggaaaaacacaactaatattaaaaatccacttacaagaacatacactcctcccttccttttatttacatttgtcattttatctttgtgttttctgaatagcaatgagtcttatcattttgagcttcactgagcaggaagcaagggcacccacattgataatttttttcttcgttttttgagagaatgtctcactctagcacccaggctggagtgaagtggcgcaatctcggctcactgcaacctccaactcccaggctcaagtgattctcctgtttcagcctaatgagtagctgggattacaggcatgggtcaccacacctggctaatttttgtatttttggtagagacggggtttcgccacgttggccaggctggtctcgaactcctgacctcaggtgatccacccacctcagcctcccaaagtgctgggattacaggtgtgagcaaccacacccggtaagaattaattttgaaacatttgctgctttaattttagagcaaatttgagccttaatcccagagagtttcaagttctctggctcccagctcactcagtgctctgggtattgttgcggggtgggggcaaacataacaggtggatgagattctgggagctgagtctgactcaccccctcagcagcatcaatgaaaaggaccactccatctgagatgcgcaagccagctgtgacctcatcagagaaattcacatgtcctgaaaagcaaatactaagtaagtcatcacttggtgcaggataaagcacaattaactggtagggtgaactgagggggcacttcaaagcccgtgaacctccgaatatcccctttcctcctcgccataaccccccacagggtaaaaatatcccccattagtgtcatatccttgcattaagctttcctacgggaggctccctacataaaaagagggactcctgggactcatgcccaggagagcatgagtccacacacacagaccagcttagcctaatcagcagtaagtagagttctgtgggattcaagacaatctggaggcaggagaaagggcaaagcagggcctggagcacagtgtgctgctcgaggaaggcagttcctggcaaggtgctatgggggcaggggctgagaggtatcaggacactgggcatcagatggtgccaagaaagcaaatcagccaaaacctaaaaccttccagtttttaaaaactctgccccagttggtcctttccataggaggaagagtcagccaaggtgcgctgctcccaaggtcatcaggatgttcaccagtctccttcaaaagactgagagtactcaaggccagggactggctctgactcacctttagctccccagcagatagcatggggcctgacaggctgaaatgaataaatgaatacaattccctaacatttttaaatattcgaaagagtaaagacatgaatagaaggcctggagtatgatgcttgctaaattaacaagtcagaaacaaaggagagagtcaaaatggaaaatggtttcaatgaaggtgagggaatgtaaaaacaaagatgcactgctccgttctgctccgaaaagtgagaggacacacgcaaaaccaagacaaggttctaataatcaaaagccaaaggatgtcctacctggagtgtccatgatattgaagagataagattttcctttggtgtctggcaagaccactgtcacaggagtgcttttgatgcctacacctctctgaaaggaacaaagagtggtcaagacctcttcctatgcaagaggggttcattttgtttttggggctccccagttgctagtaaattacactgatgcctctccttatagtgggtgatttttatctaggcctctagccagcatgaccttgaagataaaatatcttggtgttagacaccatttttgggggacttgtttcaaatgtgaaaagatgaaaatgaattactgcaaacaaaacagtattaagccttatcagagaatccagggtcctagaatctcatcctctttatacattagaaacaaaaacaatagctgagcaccttgaaagtaaaaagaaacaatctggggtattttagtttttttttaaaaaagaaatataaaagctatgacagaaataaacattttttttaaaactccaaacaaatacataaatacattataaaataataacagctaacattgattgcctatctatctttactaattccaagtgcctttagttaaccatacttattatacttaaaacttccattaggaaaaagagacagaaataagaggagggaaacagaaggggtcagagattagagagaaagatccggaaggaaagacaaaaagagaaacacaaagatataggaacccattttcaaagagaagctactcctagaaagaggtcatcatatggatggactcatcctgcggatttttaaaggatgatgtcattttaaaaaaatcatgttgagcttctgcgtaacttatagcacaaatgcagacatcgcctcttagtacttctcctatattaggccaaatttaatctagtcaagaacaggagggttcccctcctaacctacagcttgcctacccagttctttttcaagttataaccctggagtaactgggggaagaaggagatgggatgtgagaagtggagagagaggagtaggatatgaactaaaatgctatcataaaggctcctctacattccctacaaaactattactggtgggtctggtgtaggtgacaatcagattccccaaggcatgcttacctcttgctctgtgaagaggatgtcagtatagcacagctgaaaaaaaattaactgttgttaccacctgagttgagactgctctcccacaaacgaaccatcaatcactttccctcactacctcccagctcaagggtttctttgagattaaagagagagagagagcagggtgtccccacagcaattacagacaatgagaccagtgccctcccagctggaaatgctcctgggtgtgtggagggatttttttatttttacttttttggagacagagttttgctcttgtagcccaggctggagtgcaatggcgcgatctcagcttactgcaacctcctttgcctccagggtttaagagattctcctgcctcagcctcccaagtagcagggattgcagacgtgcgccaccatgctcagctaattttgtattttcggtagacacagggtttcatcatgttggtcaggctggtctcgaactcctgacctcatgtgatccccccggctcagcctcccaaagtgctgggattacaggcgtgagccaccacacatggctgggtttttctttttggttgtgattttgtctttttttgagatggagtctcactcagtcgcccagactagagtgtggtggcataatcttggctcactgcaacctctaccacccaggttcaagcgattctcctgcctcagccccttgagtagctgggactacaggtgtgcaccaccgtgcccacccagctacattttgcatttttagtagagatagagtttcgccatgttggccaggctggtctcaaactcctgacctcaagtgatgctcctgtcctggcctcccaaagtactgggattataggcatgagccaccactctttttgagttgggggaggtcactaaagaccaggtatagctgagagataatttatatcaaatgcacagaattcttagtgtggtaaagggagacacatgtcagccttaatgctaaagtgttaaaacaatcaatctggcagggtttgaacatttattgcactgagacttgcagacacagttggcctcattcacaggcatttaaatttaccatgaaaaccaggtacaattgtaccatatttatagagcaggctattaatactataacaggaaagaatagactataaaagtcaggatatatcataacagaggagggatcccaagtgcaaaatggatcatccaaaaatactgcagctcaatattctctatgctcccgagaaagttgaaattattttcttacagcctattaatagagatcacaattataaagctgcactttggaggcgtcattatttatagagaacaggaagggtgaaggaaggaggagagagacatctctatctgttctgaatggttcatcctaaaccctcaacagaagttctacttacatcttggtcatagcgctttctgatttccgggtgagtctgttcaattaaacaatccacaaaacatgtctaaaagggaagaaacagttaacatctgccgaccacagaggaaaatttactgtgcccttcccccagctcccaatacaccacataatttagggataaggagagaaaaaggagagcaaggagggttatgggacagcaaataattaacactgaagccacaggattattttcaaataaaagatgaaatctttcttagacaggcatccctcaggaaatgaaaacttataaaaatcagagtaaggctcaatttcccatcttctgtccagatgtagacataaggctcaggcatgcaagtggcttaggaacaggctccacctgctgcttgggaaaagccagaatttcacagtatgacttcgtaacaggcatgcagcacccctagtcaggaggttgagccttgtgacctcaaacctcaaccgctgtgactctaagggctaaaacatgagcaggtacaaaagagaaatcctgttccaagtagctgaaagttccgtcttaccttgccatggtggagatgtccacaaagggtcacatttctgatgagctctgagttatccatcagatccgccaagaaactgaaaggacaaaggaaaagagaaaagagagattggcaaacgtttccaaatgaggagtggtgtaaaggtgtttcaggtattttttggccaggaacaactttcagaccaactggagagtgctcaggcagatgtgaatgtctatacttacatagctctggctttgggaatgcaagaaacttatccaagaggtaacacaatctgtgaatggactatcacggggatttcaatagtaaaacagcaagactaaaaaaggaagaagaggctgggcatggtggctcatgcctgtgatcccagcactttgggaggccgaggtgggtggattacctgaggtcaggagttcaagaccagcctggccaacatggtaaaaccctgtctctactaaaaatacaaaaattaggccgggagcagaggctcacgcctgtaatcccaacactttgggaggccgaggccaccacgaccagctaatttttgcattttcagcagagacggggtttcaccatgttggtcaggcaggtctcgaactcctgacctcaggtgatccacctgccctggcctcccaaagtgctggcattacaagcgtgagccaccacacccagccaggacttccaacatggtgaaaccccatctctactaacaatataaaaattagctgaacgtggtgacatgcgcctgtaatcccagctactcaggaggctgaggcgggagaatcacttgaacctggaaggtggaggttgtagagagctgagatcatgccactgcactccagcctgggcaacagagtgagaccccgcatcgaaaaaaaaaaaaagagagagagagagcacctaaatgatcctacacatatatctacctccttttgctctccttttcaaaataaagagttgagggccgggcatggtagctcacgcctgtaatctcagcactttgggaaactaaggcaggagaatcatttgagcccaggagtttgagaccagcttgggcaacatagtgaaacagtacaaaaaacacaaaaattagccaggcgtggtggtgtgttcctgtagttccagctgctcaggaggctgaggcagacacatctattgagcctgggaggtcaaggctgcaatgagccatgattgtgccactgcactacagcctgagcaacaaaacgagaccttgtctcaaaataacaacaacaaaaacaaaataaagagctaatatattcctaaaatactcagcagtcttattgagtccaaacaggctctggtggatccaacagtgataactgcaatacccagatctctcttgaaggctggctttcaacatcaaactaaagatctggaagaggaaacagctaacatttggatgaacaccaagagaaaagttaagattgaccccaaatatcccagcagccacacaagctgaaggagaatttgagagctatgtacggccacaatttactagctatttcagccaaaagccacctcttatctctacaaaaacatgaacccacagcattcctgcagagaagctgagaaaccttgtaacttactccatctcatacaccgtaacaggtaatgtctgctccatcagagtgaatttcttggttttcactggcttaataatgggttctagaagaaaaaaaaaaggtagtgatgtgtaggtgggcataaaacataaaaatacggaacactattccattagactgacctttcagaatgtatgatgtatgacatcaatttattttactctcaaggatcactcatatgttgagaaagttttggaaatgctgtttggcatgagacagtgaaggaccttgaattgtggaaagaggagtctgggcttcattttgagggacagtgggagggagggagggggaatggatgtaggttgaggtcaatgtcagttcaggatctttccttgcatttataagatgcaatcactttccaaaagatcaatgaaaacttttttttttgggagacagggtttcactgttacccaggctgaagcgtacaaatggcgtgatcaagtgatcctcctgcctcagtctcccgagttgccaggaggcatctaccaccatgcccagctaatttttgtactttttttgtagagatggggtttcaccatgttgcccaggttggtctcgaactgctgggttcaagcgatcctcctgctctggcctcccaaagtactgggattacaggcatgagccaccgcttccagcctatgaaaactattaaatggacaataaggctggttgcagtggctcacgcctgtaatcccagctctttgggaggacagggcagagagatcacttgaggtcaggagttcaagaccagccaggccaacatggtgaaaccccgtttctactaaaaatacaaaaattagccaggcatggtggcagacacctataatcccagctactagggaggctgaagcagaattgcttgaatcagggaggcggaggttgcagtgagccaagattgtgccaccgtaatccagcatgggcgacagagcaagacttcgtctcaaaaaaagaaaaagaaatggacaatacatattatgagaactggttaaaagggttggagttatttggatggaaaaacatatcaggccacagggtaaataaacttaacgacagtcttcatgcacctaaactgatagcagataaataagaaataactcttatttgcttagaaactagttaagaactttactgaatattaaaaaaggattaactaaatcttaaaccagaaacagtacctgaaggtagtaaagaaaaactgatcaattcattcactgaacttttaaggtttgctgagagctatgaagtttccaggtttcaatttcactccgcacagcccatgtcctcctgatgtacctgtgagaggctgagtgtcttcctcttgaactatggtctccacctcaggaccatacacctcctcggctgttgggtagtacttcttgtcctcatgcagcaccacctccatcccagggtggtcatcgtcatgatctcctacgtcatcgtcgtcgtcatcatcatccatctgaaagcaagagggagagggagaatcgaagaggcacacgcttttcctgtttgatatctgactacctccgtgagtgacagcactgactgtacatgctggccagcttcttattctgagttctatgccagtgggggaggttccactcctttgagacccttcacaaagagaagactctaagccgaggccatggacagtgctcctggttcaaacttgcccctttctgaatgtgggccactggtcacaagtgggttgagactggagaaaacaaatcacagcacagccctttacggggaaaaaagcaactttctccaaaggcagaaaccaaaagccagaggtaaaaactgaagataagcccatacctttaaaattttcacttatatccacagaattgtttttggaaaataactttgtgatagataataacaggtgctggcaaggatgtggagaaactgaaacctcccacactgctgatgggaaaaaggtgcagctgctttggaaaatattttggtagttcctcaaaatgttcaacacagagttacatatgacccagcaagtccactcctaagtatatacccaagacaaatgaaaacttatggccacacaaaaacttagaaatcaatgttcatagtggcattatttataatagccaaaaagtgggaacaaccaaatgtcgatcaactgatgactggataaatgaaatgtggtacatccatacaaaagattatttggcaacaaaaacaaacaaaatacctatacttgctataggtatatacatgctacagcgtagataagccttgaaaacatgatgctgagtaaagaggccagactgaaaaagctgcatattatatgattccatttatatgaaaatattcagaataggcgaatctatatagacagaaagcagattgcccagggctggcagggtaggtgtgggtgggaggacaatgggtaaggggtgtggagtttttttctgagataatggaaatgttctaaaattgattgtgatgacagttgcatgactctgtgaatactctaaaagccattaaattgtacactttacaattaaataacttcaaatctgcctccttacaaattaacccatagtcatatgcaacattaacgaagccattctcacttctgctaaaaagtcttccaaataatctaaggtggccaccagatcaccctttaagtcctaaaacacttactgagcacttaatatgtgctaagcactgttccaggtgttagtaataaagcaatcaaggaaaaagaggtgctactgaagcaaaaaatctgcagacagagaataagctctacaggtacctggggaagagcattctagtcggctggtgaaacagcgaatgcaaaggcccagagccaagagcatgtggcaactttgaggtttagcaaggaagccaatatggtgagaatggagcgaaggatgggggaacaggaagctgcgatcacatgggaggcaaacagacaggatcttctggaccgctctaagaatttggactttacttttactctagagcaaaagtaggcggggaggtgccattagcatccagtgggtagaggccatggatgctgctaaacatcctacaacacacagagtcctcacagaaagaattatctggccccaatgtcaacagtgctgagatgaagaaactctgcaccaggggtttggagcagagaagtgatatgatcagacttctgttttaaaagaaccactccagcccctatgctgagaatacactagaagcaagaagattagttagggggctactgcagtgattcaggaaagaaataacagtggtggtggcttggagtagacagagtgggaactgggaaggtggtgagaagaggctgaattctggatacattacaaaggtagagtcaaaactgttttctaatgaattgaaaggaggtgtgagaaaaaagagaagcagtaaggtttttgatctgagcaccggaaaacagccttgcctttattgagatgaggaagaaagactgtaagagcaggttgggggagcagggcggggaaagctcagtacttaggtgtgagttaacgccaggcttgagattccctgttagacattaagtagagatgccatgtaggaaggtggacatacaaacatgccattcaagggaaaagtccagattggagatacaaatctgagtcgtcataaagttatttgatagactggatgagatccccagaggagtgagtgtagacagagaagacgtctgaggaatggagccccgggcctgctgacatttggaggtcagggagataatgaggaagcagcagcaaaggctgagaagggatggtcagtgcggaggaaaaccaggggttctctgaaagccaaaggaagagagtattttaaagaggagggaatgatcggctgggacagacggatgcaggcaggtcatgtgggctgaggactgggaactgaccttgggatttcgcaaggcagaggtcagtggtgaccttgacaagagcagtctgtggaatgcgagaggcaaaaggatggaagtgggtttgaaggaaaatgggaggagaggatctggagacagcaaccatgaccacctaattcgggatgtgctgcattggaaagcagggaaaatctggaggtaaatgaagggggatatggggtcaagagagagttttaggatgaaatgacattttatctgtgtatgctgatggggatgatcctgtagacagggaaaactgatggcacaggagagagagggcagaattgccaaaggtcttgagtggtgagaagggatgggattagtttctagtagacagaaacatgaacaaatcattcgtaagaacggaagggaaggcatcgtatatgagtacagatgtaggcaggtgggtagagggactgctgggtgcttgttttccttcacacaaattccagcatgccaacctcttccttaagaacacaaaaccctccagtggtgagaccggctacctcctaccatcttacactctacttctactaaagtggcctaagattacattagctcttttggcagccacatatatcctactggtggtggctccaaatagctatcaagccagttttctcctgccccatactgctgaatatattatgaatctaactgcaggattttatataataatttctgactgcctgtaattatctctatccgagtctacagtagctcaacaagtctaaacaaataaaactaaacaaatattcttttatcattgctttttctaatttttaatttttttatttttttgagatggagtttcactcttgtttgccggggctggagtgcagtggcgcgatctcagctcactgcaacctctgcctcctgggttcaagagattctcctgccttagcctctgggcatgccacccaggcgcatgccaccacgcccagctaatttttgtatttttgtatttttgtatttttaatagagacagggtttcatcacgttggccagactggtctcgaactcttgacctcaggtcatctgcccacctcagcctcccaaagtgctgggattacaggcatgagccaacgcacccagccttagaagggacatctttctttcctgtccccattaccaaaatctatgcatctctactgttatatacctcaatataattaaaaaaaaaaatctgtccaggtgcggtggctcacacctgtaatcccagcactttgagaggctgaggcgggcagatcacctaaggttgggagttcgagaccagtctgaccaacacggagaaaccccatctctactaaaaatacaaaactagccgggcgtggacgcacatgcctgtaatcccagctactcgggaggctgaggcaggagaatcgcttgaacccgggaggtggaggttacagtgagccgagatcatgccattgcactccagcctgggcaacaagagcgaaactccatctcaaaaaataacaataataataaatctatgcatcttgtggactaggaggctataaccctcattctgctggaaagagggtagaccagtacagccattttaaagggcaatctgacagtacttagtataaacatattaactaagtataaatacaataagcatatgtagatagagatataatatcctacaaccagcaactctgctcttgggaatataacccaaagaaatttttccacattgcataaagggacacatatgagaatgtacactggattattaattacggcgagggaaggctggtgacaggtaaccttggtgtctatcactaagagaggaatgtcaccagggcaaaccgagtagcagtcagttcccacagactagatgtacacacagcaacagggagaaaccctaaaatgcaccactcatcatgatgctgagtgggaaaagaaacagaacaatgcagacaatgataccatttacttaaaatacacacacactatgcaactcatagaaaaagaaacatacataaattacaaagaactgtggtggcaggtatgggaatgagataaatgggaattaacaaattaattaaataacagcagagctctcacagcaatgacactgaggagtaagaactaaagagtatgagtgactcaactgtttgtactgaggtaaaaaccttcatagggtctcactctgttgcccacgctagagtgcagtggcatgaccatagctcaccactacctcaaattcctgggctcaagccatcctcctgcctcagtctcctgagtagctgtgactactggcatgtaccaccatgcttggctaatttttaaattttttgtagaaatggggtctcactacattgcccaagctggtctcaaactcctcggttcaagtgatcctcctgccttgaccttccaaagtgctggggttataggtgtgagccactaagtgtttagcccattattctttattttaaaaatttttttgttaatagctttatagagatataattcacattccatacaatctatccattttaagtgcataatagtttttagtatattcacagaattgtgcaaccatcaccacgatcaattttagatcattttcatcaccctaaaaagaaactctgttacttaccaattccacctgccctcactcccaacaaaaaaatcctgcctcagcctcccgagtagctgggattacaggcgcgcaccagcacacccaactaattttttgtatttttagtagagacggtttcacaccacgttggccaggctggtctcgaactcctgacctcaagtgatctgcccgcttcagcctcccaaagtgctgggattacatgtgtgagccaccacgcctggcctattactgggtttttagtcccaaattcatgtatgttgggatcactttgaatttagattctgttatccaatacattagttttatgtcatgtgcaaattagataaacctctgttctctatctttacccaagtcactaataggctgaatgacggggcacaatggttcccctatgtaatctcagcattttgggaggccaaggcaggcagattgcttgagcccaggagttcaacaccagcctgagcaacatagtgaaaccttgtctctatttaaatatattttaagttgaaaaggacaagaccaaacacagatgcctaggacatgtcacaagagctctgctggtgacccattaatcaaaaatctttgtgtcccactgttcaaccagctgtgacctcctctaattgtattatgatgcagcccatgttcttttcactaggacatcatgagttacagaggttaactggggaagaagagtgaatggaatgagaacaaaggaaacctttctatcaacatggtttgaatgagaatgtattcatgaattacctatataattaaagaaaaacacactgtaaaaccttttttttttttttttttttttttgagatggagtctcgctgtgtcacccaggctggagagcagtggctcgatctcagctcactgcaacgtctacctcccgggttcaagcaattctcctgcctcagcctcctgagtagctgggattacaggcatgtaccaccacacccagctaatttttgtattttagtagagacggggtttcaccatgttggccaggctggtctcaaactcctgggctcaagcgcctcagcctcccaaaatgctggaattacaggcgtaagccaccacacctgactgtaaaccttattttcaaaaagaaaaaaaaatgctggtttataagacatcaataaaaaacttcaaatgtcttgcccaaatcaagatacatcatgtccacagcatgcccctgacctgtggctcaacctagtaatcctatcaagagaaaattatttttataaaactcatgctagcttcctaagtactcaacagtcatttttttttttttttgtttgagaccgagtctcactcttgttgcccaggctggagtacagtggcacaatcttggctcactgcaacctccgcctcccgtgttcaagtgattttcctgcctcggccttccaagcagctgggactacaggcacgcgccaacaagcctggctaatatttgtatttttagtagagacggggtttcaccgtattggtcaggttagtcttgaactcctgaccgtgtgatctgaccaccttggcctcccaaggtgctgggattacaggcatgagccaccacgcccgggccctttctattgcttttatgcatctctgaaaatctgagcttgtgagggagctcccagtgcagctgtagctggaagagttgagtatcttttccaagtgggaattattcatgactgttaaaagacacttcagggaaatggaagaactaatgatcaactagagctcagattacaaaaccatctcatcaatgaaactacatattcccttttggaaccttagtagcgaagctttgctggagcagtatgagatcccactaagtcatgttataaaaaggacaatctcaagagacgtacccagggtatcactggaacacagaggattcaaaatttcattgttttttaaaaaaaggtgggggggggggtgggggggcaggcatggtggctcatgcctataatcccagctctttgggaggccaaggcaggtggattgcttgaagtcaggacttcaagaccagcctggacaacatagtgaaaccctgtctctactaaaaatacaaaaaacattagccgggcatggtggcacacacctgtaatcccagctactcaggaggctgaggcattgagaattgcttggacctgggaggcagaggctgcagtgagccaagatggtgccactgcgctcctgcctgggcaacagggtgagactgtctcaaaaaaaaaaaaaagaaaaaagagggggctgggcatggtggctcatgcctgtaatcctagcagtttgggaggccaaggcaggtggactgctcgagctcaggagttcaagaccagcctgggcaatgtttcatctccacgaaaaataaaaaaaaattagctgggcatggtggtgcatacctgtagtcccagctacttgggaggccaaggtgggaggatcacttaagcccaggaggtggaggttgcagtgagctgagattgcgccactgcactccaacctggcaagagagtgagatcttgtcttaaataaaataaataagagtgagataaaagagcaatatatttgttttacctcatcaagatctttggtctctctacccaattcatcatcatcttcatcagaatcaagctctggtccaatataattcccaaactcatcatataagtcggtatccatgatgctaaaattcaaggagagaagagttagattctgacaaggtaatcaaggccttcatgtggtggctccacctgtctagtcttagtcttatggttggccatacccctttcacatgcctcctctccagtgacatcaacctactgaatgctcctcccaaagcccagtactttccccaagtctctgccttacttgtctctatttatgtagtcttccctccacttttcttgttttgggttttaaggagcagagagttgaataggcaagaaggaagaaagaagacagaaggaagaagctccgccgtacagagatggggcgtggggggcgctccaaagccaaaagaggaggtccccctccctccacttttttaatactaaatttaattttaaaacaactcagtatcaaaaaatggcaagaacagtacaaataacttactttttcctaaattatttgaaagtgagctgttgacacaatggctcatcacctcctaatactttagtgtaagggtgggcaaactctggcctgtggccaaatctggcccctccagctgtttttacatggccctcaagctaagaatgctttttcacatttgtaaattgccagggaaaaagtcaaaagaaaaatatttcatgatacatgaaaattaattataaggaattcaaatgtcagtgtctattaaaaaagtttcattgggaggccgggcgcggtggcgcatgcctgtaataccagcactttgggaggccaaggcaggcagatgacctgaggtcaggagttcgagaccagcctggccaacatggcaaaacgctgtctctactaaaaatacaaaaattagctgggtacggtggctcacacctgtaatcccagctactcaggaggctgatataggagaatcccttgaacccagggggtggaggttgcagtgaggcgagatggcaccactgcactccagcctgggagacagaacaagactccatctcaaaaaaaaaaaaaaaaaaaaagtttcactggaaaacagccatgcatattcatttgcatcatttacagttgccttcacactgtaatagcagagttgaatagttgagactgaaaccatatggctcacaaagcctaaaatattatccagtccttaatagaaaaagtttgccaacctctccctcaccatgtgtaattcctacaaacaagaacattctcctacataaccacaatacaaccatcaaaatcagaaaattgatattcacacattactaccaccttctttacagatcccattcaagtttcacagattgttccaataataccttacacacctaaggatccaatccaggatcatgtttgcatttggttgtcatgtctctagtctctttggatctacaatcttcagtctttggatctacaatcttcagtctttccttccaaggactgtcatgaaatccttaaggatgtcccttgatttgaggttgtctgatgttaccttatgataatattcaggttatgcgttttgggcaggaatatcatagaagtgatgctgtgttcttctcaatgcatttcgtatcaggtgatacatgatttcaatttgccccattagtggtaacgttaactttgatcacttcattaaggtgatgtttgccaggcctctccattgtaaagttactcattttccctttgtaattaagtagtgttttgtgggttttctccacttcaattactgaaattctattcaaagaaacagttcaaatgccaccacctccttcaagctttcctagctcctcaatttctcattcctctatcctactagagctttttgcacctttatcagtatttaattttgtcttaaatagtagttaactggctgggcacagtggctcatgcctgtaatcccagcactttggcaggccaagatgggcggatcatgaggtcaggagatagagaccatcctggctaacacagtgaaaccccgtctctactaaaaatacaaaaaattagccaggtgtggtggcacacacctgtagtcccagctactcagcaggctgaggcaggagaatcacttgaatccaggaggcagaggttgcagtgagctgagatcgcaccactgcacttcagcctggctgacagagtgagactccgtctcgaaaaaaataaacaaaataaataaacaaatagtagttactaattaccatcaccaactatagtttataagcaataaataacagactagagcatcagggctctggagttggaagacttagattcaaatcccaactttgtcaccaacaactatgtaacttgaggtaagttacttcatctcttccaacctgattcctattcttcaactggaaaatggaatgaataatcctcactgaataaatggttatgaggattaaataaaacaccctgtgtaaagaatttaccagagtccagctgggtgcagtggctcacgcctgtaatcccagcactttgggaggctgaggtgggtggatcacgaggtcaggagatcgagaccatcctggctaacacggtgaaaccctgtctctactaaaaatacaaaaaattagccaagtgtggtggtgggcgcccgtagtcccagctactggggaggctgaggcaggagaatggtgtgaacccaggaggcggagcttgcagtgagcggagacagcgccactgcactccagcctgggtgacagagagagactccgtctcaaaaaaaaaaaaaaaaaaaaagaatttaccagagtcctaggctcaataaacgttagctagcattattttttgccatccttgatcatgagaaccctgtgttccatgcacctgcttcttctcttcacttcttttatgatactaaatttaattttaaaataataccaaaaagtggcaagaacagtacaaataactttcttttccccaaatatttgacagtatgctgctgacacaatgcctcttcacctcctaatactttagagcaagagttgacaaactctgacctgtggccaaatctggcccctccaactgtttttgcatggtcctccagctaagaatgcattttacatttttatttttttatttttttgagacggagtcccgctctgttgcctaggctggagtgcagtggcacgatctcgactcactgcaacctccgcctcacaggttcaagcgattctcctgcctcaacctcccaagtagctgggattacaggcacccgccatcacacttggctaatttttgtatttttagtagagacggggtttcaaccatgttggccaggcagtctcgaactcttgacctcaggtgattagcccacctcggcctcccaaagtgctgagattacaggtgtgagccaccgcacccggccacattttacatttttaaataattgagaaaaaagtaccaatgctaacacagccaatagccaagacagcaccttgcataagtaggaactggataaatgttaactgaatgggatgtttaattttaagatgctgatatttcttggattagactgatacctccaactccctcaatgccacctgctgggtgctgaatgtagagagagaattggagctccaaggaccaataattaaatgtaaattattatggaaactttcacatgcatattctttttacttctaaaaagctactatcgcatttatgcttatctcattctcccaagaccccagtcaagggattgaagaaattatttatttattttatatatattttttgagacagagttttgctcttgttgcccaggctggagtacaacggcacgatctcagttcactgcaacctccgcctcctggtttcaagcgattctcctgcctcagcctcccgagtagttgggactacaggagtgcaccactacgcctggctaatttttttgtattcttagtagagatgggttttcaccatgttggccaggctggtctcgaactcctgacctcaggtgatccgcccgcgtctttctcccaaagtgctgggattacaggcgtgagccaccgcgcccggccgattgaagaaactgttatagaaagctgttcatggaacaagccaagctcatttctgcctcagggccactgcacttgcctttctctttgtccaaaacgctctcccctttgatatttttcaccttgttcctttatttcaatcaagtctccactaaaatgtcatcttctctgtcactctaaaaagtcccccatacatactctccaacttcccactttcactgttttattgctattcacaaatgttatacatttatcactagctgacttgtatctagttgtttactgttcatttccccaactacaattgaagcaaagactttgttcacttagtactgtgcctagcatagactaagccctcaataagtatttactgaactaatgaatgactctaacaaggtacacagaatatagctgatttgcccacagttacacaaaactagcgactcatggtaacaaacctcactgccgcttcccgctacaatgcaggagctcagaggacttcggagggaacttggcaaagaacggctgaaagcggcacggatagaagaggaagtgagcgaggggactggacagttagagcaccactcctacctagcgatacgattttacggactgaggctatagaggcagccccgaaatcgaggtgtgtgcgtgtgtgcgcgcttcggaagccttgggaaggcacgaggacgacagggtcttccattctttttcccgctccaggcctcaatttaccgatccgtaaagcgaaaggggccaatagcatataaggccccttccagatctgacgctttttaatttcctatcccacctggagcaacccttccgtgccgctgacccgcttcaacttacctctcgcctgctcagctaagagttcccaggccgctgccggagatcgtgcttccgccccacgccgaggaaacgcctgcgcccgccgccaggaaggaccccgcagacgccgctgtcgcctttctgcccgggaggacaaccctctgcctgaggaccagttccgaggtatgcccgccgcggactggcaaggcggagtagcgggtccccaagacgagtagcccaagacgtgggctgctccaaagagggtgagagctgaggatgaacgaatctgatcaggcgcctcgggaccaccctgaaaatggggggaggggccttcgggcagatcacgtggtcaggctgttagcgcagttgctaggcaaccacagctgcgggcgtggtctgcgcggggttgccctcctgttctggtttatcaggggatccccaaagaaagcaaggggaccaaggccgggactgctggggtgaaggtccgggaggctgagtaaggggacggaagggttagttctatgtattaaatgcctggggagggctgagaactggacacctgatttcggttactggccaccccagccccttcttggcgttcagattccctacgttggggtagggtggctatgggattggttggggacttcctgcttccttgcgctagggctgttggtgatgaccccgccacaaaatctagctcaactcactaggagtttgcagttcagagaggtcccacaagtaaatgccagagccacgactagaacccacgtagagaatctctctgcagtggctcacgcctgtaatcccagcactttgggaggccgaggcgcgcggattacttgaggtcaggatcgaaaattgcttgaaccccggaggcagaggttgcaatgagccaagatcgcgccactgcactccagcctgggcaacagagccagaaaaaaaaaaaaagaaaagaatatctctgtagaaatgatcagtcagcctcagatatgcagaaactacagaagtacagtgatagaactaaaggcattgcccaggtacctagggacctctgttccagccctgggctggacagagggatttggggatggggtcattgagctccttcctttgccccttctacttgatttcctgctcagtcattgcatctggtttgggtgaaagtctccttcctcattaaagacattcaatgaagaatgaaactttatccccgagctcaagggtaactaacaagagttctgcctttgtgtgaggtcccctgtcgaaacgacttgctgtagaacaatcctatgggggaagagtgaagaaactgaattctgagatcccaatgcctcctcgactgaagcaccaaaattaaaaatatttttagaggcaaagagcaaaattaagacagaactccaaattgaaagtcaggactctgtattctattttcagggacaagtcttgtgtaagtcctcactgtgaaattcaacttgtctttgtaaaatagaaaaccagatttttgtaacacctcccaatctgagtgacatgatgtccagagtgctttggggtcattttgtgttctggtgaataattcagaggtaccctctttcccctgatattgactgtccactgacatgtattccctttgccttcccaggcacaggccatggaaaggaatgacatcatcaacttcaaggctttggagaaagagctgcaggctgcactcactgctgatgagaagtacaaacgggagaatgctgccaagttacgggcagtggaacagagggtggcttcctatgaggagttcaggttggctcactgccatttttctcaggccctcctgttatggtggattatagtagttaactctgaaatcaaaccattctgggcttcagtcctggccccaccgtctactgtttgatcttatgcaatttccttaacttctctgagtctcaattatttatctgtagaacagtaactgttataattaaatgagttcttgcacataagactgagcaagtgtctgacacatgtgaggtgcttgaaagcagtcagctatcgctgttgttattattatggtcatattggtccgtaacaggtttatcctataccatgcaaagtctagctgcctcacacccacagacacagcattaagtccattgcctaatttctgtcctttgcctacaggggtattgtccttgcatcacatctgaagccactggagcggaaggataagatgggaggaaagagaactgtgccctggaactgtcacactattcagggaaggaccttccaggatgtggccactgaaatctccccggtaggtgaggccctgcccctttagtccagcaggattctctgccctaaagcttcaatcctgttttttcattttgttttgttttgttttgtttttttaaccacacatacctcttctttatttgtcatgttaaaccaacagagataggtttctgcctccaatcccagaaagaaaaacaaacagcagatggcaaagctgagttgaagtgggcagaatgagtcagaaagttgggctaggaaggtcggcttcccttagtcctttgactttcattctcagatcagaattgggatgctctgcctctgggttgtatggtgtctagtgtaatgatcctgtggcagtgttgagagagagaccccaacattcagatccttgagttcctttctctcttcctgagatttccaatcaacccatccacccgacttacagtaaaccctgacttactcttgaagaccagagctatgtctccattcatgagtaggaaaattccagtataaatgagaatctcaaatcatggcgtggattccttggggccctccctgtttcatccccagtttcctcatctgaaaatgaggccgccaaggaccacagctttcccagtgctcagacagtagtgagatgaagacagtaagatgaagagctacaggctcccctccctgtcactgttgcagaacagctggaagagctcctgactccctttccttcctttgtggtccaggagaaagcccccctccagcccgagacgtctgctgacttctatcgtgattggcgacgacacttgccaagtgggccagagcgctaccaggctctactgcagcttgggggtccaaggctcggctgcctcttccagacagatgtgggatttggacttcttggggagctgctggtggcactggctgatcacgtggggccggctgaccgggcagcggtgctggggatcctatgcagcctggcgagcactgggcgcttcaccctgaacctaagcctgctgagccgggcagagagagagagctgcaagggcttgtttcagaagctgcaagccatgggcaaccccagatccgtgaaggaggggctcagctgggaggagcagggtctggaggagcagtctggtgggctccaggaggaggagaggctcctgcaggagctgctggagctgtaccaggttgactgatgcggcaagctaccctcagaggtcccagtggtcactggaggcagttttttggttgttgtcttgggggttctgcaggaccataataagaaacccacacctggttcccttctcaacttggaattttcagagcaaaaacaggaatcaagtcttccccacttctccagtccctcagtgtctcgctgttttgaactgtgtgtatccatggacagtcaagagctcaggaagttgagagcggttttgtttcccacccttagagtctgccaagcctctagcccactggccttgagagatgagtgtgtgcccaaccaaatgctggctataccagttacagcctccactcataaaagggaaaaagcaaaatctttatggtaaacaaacactgatctccacagctcttaacaagaatgtttatagccccaaaccaatgaatggacatgtaatcaacaaatgatcaaatactacatcatttgaggtgttgaattttcccctagagactcagttcttgtgcaggttgggcctgggaaagtcccaagccatcagctcaggtccagccagcctcccggatggccagatatgcaggagggtgggtttccttcatcccccaggttgatgaaagacttttccaccaggctggcagggcagggcctggagcactgaggcagagatctccctgcccgagcacctcggcccgcccttctcattccggtttcctttgacccattcttgggtgagcgccagtgttctagaaaggggagtaaaggccaggttctagaatggctttccccccccaccctgagatcaggtctggaatgttagaagggcatcttgtacatccactgggaataaattgccttgcacttggcggcttcctctgcagattgttgctgcttttcctggctgcataatcctttcctcatctagaggcttccgcttagcagagctttctaggagccctatgagcctttaatgccctggttttgccctgcccctctgacccctgcctccttcaggtatgcacctggccctcaccactgtgctcctgtgggcatgggggctccaggcctttgaaattgtggagaaggaaaacatttttcagaggaccccctgccctgctttcctgatgtttgaaaatgcagcctacctggccgacatgagctttgagcttccctgtcactgcaaacccgaagaggtgccagctgtagtctggttctaccaaaagcacctaggtagcagccacaccaaagtgctgacggactttgatgggcgggtgctgacggaggcagcccaggtacgtgtgggcagcgacatgctgacccgcttcagcatccgcatgttcagcttgttggttttcagggctcagtctgaggactcaggcctgtacttctgcggcacccgcaagggggactacttttacgcctacgatgtggacatccagaacagtgagggaatggtggccactttccaggacaagggccaggagccctttgcagatgaatactatgggcacctccatgtcttcaccaccttctgggaatggaccccctgtgaccgctgcggagtgcgtggggagcagtggcgcatcggcctctgctacctgcagagcccagacctctccccacgctacctcaaggccgtgcccgatgtggtgtcttgtggctcaagggctgtgccaaggaagctgcggaccaaggccagggaccacacgcctgaggtgctggttcggagctgcttagtaccctgtgagaagacaaagaccatccgggagggcgtgctggccatcattaactatgtgtccaaagtgggcagccggccctgggtgccccaggtgcccattcagttccaccagcagagactgggccatggactcatcatctcctgtcctggggcccggccagagcatgcagtggcctgggacaaagaccgccagcacctctaccgcacacagtacctgaagggtgtcaacaggtccatgagggtgttcattgaccacggcaaccagctccacatccgcttcacccagctggatgaccggggcatctactattgctggaggcagggtgtgctagttgctggcttccggctgggtgtgacatctcatgggcactacccagcctcgttctcagatcctgagactcgctcggctgtggagctcaccctgataggctacctgctcatcacagcagtctttgtcaccattcacttctgtcgttgctgctgctacttatttcactgttgtcccagcttctccccctaggagctctcttcagctctgaagaccagttgtccttcaatgtgtttgttaaatgataccagatgtctctgggtgggtaccctgggttgggacaggtggtaggaacatgtggacaaatctgttacagcctgctccccattttcatgggcaggtctgggacctgatctgagaagtggaggggcctgaggctggtgggagattggggactgagctcaggatggaagtagggcacatgtgtttcctgacttcacatttaggtcagagaaggaaagtgtgaactcagatttatccagtggtaaacactgatcagtgttgaatcatgtttgagctgctttgctttcttgcctatgaagattgtgctggttgagttgcaggtagcagggagaggaaggaagaaaagagtggagggagctggtgtatgtcctctttggctgcgggtggaatttggtgagggcatgggccccagagatgatcagtaataagaaatgagttggtcttgtcaaaggctacatcttggccccagtcccgccctctcatgaacagatcagagtccactctggggaagggcgcagcatttgtctttatttttcctcagcgactaaaggcagcagcagtgccctgaagattagcagcagcagcagcagcaggtggcaggaaggagtggagggaaaggacaccaagtcttggggagagggaaggacccttcttcggccttagaggggagaggagaaccctgaagtgggccctcccagtcccatctctgggcacagatcccaccagtctgctcaccagtctgctcagtcaaagcagagtgggtgcactggggtggacgtgtcagccctgagcacccggcctccaggctgcaggaatatgagccagtgtcttcactttgctcgtgcctcagttttacaattgtaaaatagggcactacctagaatactgggtacattttgtgtgtgagtaagaagggaccgcaagaggcccttggcttagggaaaagcagccggtcactatggggtggagagggtcagacgtgtggcagtggcttactggggttaagaagcagcagtcccaggggctcagaggctggggcggcctggtatgacacagcaaggaagaggcctttagaaatgggacaaagtcatgccctgcccccatggatacatcccctttctctcctgtttcagcatcttcaagaggatgagtcacttccttaattcccacaatccagaggccaagtgcaactggtcacccacaacccctacttgtatgcctagcgccatcccaattgcctcctcctccatctctaccagcgtcccctccagtctgcacggggcagtcctcctgggcttgacctctctgtacccacagctgggggccaggcagcccccctctatccctcccagcacctcatccctctccacgtacacaacagatcccccaagtgctgagaatcaagctcccacctgcccacagcgtgcccacagatggcatccctggatggcagctcaggtggactgagacacttgagtcatcgctcaggaggtccttctgggatctgggcaggtgactgccccaggtggcaggacgtccccacccatcttagactgatcagggtcagtctaggagaacaaccctctgagctgggcatggtggctccaatctataatcccagctacacaggaggctgaggtgggtagactgcttgagcccaggagttcaaggtcagcctaggcagcatagggatatcccacctcataaaaaccaaaagacaaaacaagcctctggccagggctaccttgtctgtggggccttccctttcctgtctgagtctcagttttcctccagcagcctgaggaaactcaaaggcacagttcccagatactccgagagaacctccatctctggcaacagtttccataacaacaggaatcagggatgtggagggcgatgtagtaggtgccccccgccctcctccccttctctccttcctcctcattctaacgcaagctgctggccatgcccctccagactgccccttgggggtgagtttcttgttagttggagttgctgggtgctgggtgggtgccgtctggcaggcctgatactgacggagcctagggcagcaagctgacctagggacagaggagggaggggagcagctggggtggtggggagctcaggtctggggaaatgtgccagcagaggcggagcaactatcctgcttctgctcgggcccctcatgagacggggcagaggccaccaggtgggtcctgcctcacatcacatccttgtgctcctgcttggactccttaatgacctgcaggggacagggaacgtgcacagtgcaacagttaggagttcacacagaccccaggtccaccaccacgaggctgtgtaaccttgggaagtccccgacttcccaggtcttacttttcttgatagtaaccacagctgccttgcgtggtggacagagggggtggtgagataacactgggaaagcatttagcgtcatgcctggcgagtggtaagctgctggagtaagatgagctcccactgtggttggagtggcgtggcggatacgccaaatcccctcttcccattcccctggtagtttccttttaccaagctggaaatggaaagccctccccatccccaactgtgtctgctagagttggaagtgaaagctactaactttaattctctttctctccctggcaagcaaggcccccgagtttgagggtgagaaagagagagtgtgtattaggatcccatctagtggctttggtaccaaggctccccttagaacagcctatggagggactgaggaaacggaattacattcagtttccttgctctcctccagaattccctggggagctactgggagttgctgggaaccttctatgtgccagccccaggctttcctccatggcctggccttgagaatccctggggccagccagagcctgactgggcccaaatccctccttacctctccatcccgcatctccacggtcttcaccacgatgttcctcttgaggtggccttctgacacagacttggtgtccaggctggtttctgcagatgtggggagaggaggcctctcatggactttcagggcatgagccatcctctcccatgcccggcttccccatcgcacccccctccccatcatgagtatgagaacctatgcaaccgagcagagagagcctaggctcttccaaacgggctggagagcccccaaatcccaatagtgctgctgccagagtcctggctgctctgtcttctggcctggcttcatttcagcccctctgcaagccctggcctggcacctggctttctgaaaacccagcacggtattgaaatcaggagaccaggaggggtgcggtggctcacacctataatgccatcattttgggaggctgaggcaggtggatcacctgacgccaggagttcgagaccagcctggccaacatagtgaaacctctactaaaaatacaaaaaataggccaggcatggtggctcacacctgtaatcccagcactttgggaggccgaggcaggtggatcgcctgaggtcaggagtttgagaccagcctgactaatatggtgaaaccctgtctctactaaaaatacaaaaattagtcaggcatggtgacaggtgcctgtagtcccagctactcaggaggctgagagaggagaatcacttgaacctgggaggcggaggttgcagtaagctgcgatcgtgccactgcactccagcctgagcaacagagtaagactccgtcgaaagcaggcaagcaagcaagcaagcaagcaggaaagagaaaggaaggaaggaaggaaggaaggaagaaagaaagaaagaaagaaaaagaaagattagccaggtgtggtggctcgcacctgtaatccccttactcgggagtctgaggcacgagaattgcttgaacctgggaggtggaggttgcagtgagccaagattgcactactgcattccagcctgagtgacagagggacgctctgccgaaggaaggaaggaaagaaggaaggaaggaagaaaagaaggaaggaaggaaggaaggatcaggagaccagagctcaagaagtcccaacttagccaccaaccagccacatgactctgggcaagttaattgacctctcccagcctcagtttcctcatctgtaaaataaggatgatggggcctacttctctaggtgggagagaggagacaattaactaaaataaaggctgttaaacatgtggcacatattagtgctcaatacacataggtccctttcctgtcccctttcctctttcctacttctctctgccatttatctgtgctttagtgacctgtgactatctaggatttggcagtattacctctactagtcagcctggttagcctttctgatgctgaattaagtcctgagacatgcatatctagtggtcctaaatattctagtccagaagaagaggaattttgttccttagctaagaatcatttcagggccaatgcaagtaaaaagtaatttagctcccccctccccccgccccgcccgagagagaaaaatataacacgtcacattcactaatatttaacattaagagcagggaacataaaactttattcactgcaagagctgcggtcctgagggaagaatcctctgaactgagtcagcactgagctgagcgatggagcctcagggatgaaagaataaagcagagagcctggcgtccaggcacagcgagacccaaggggccctcccagtgacaggaagaggtgagacagaggctgctgcttgctcagaggccccagagcagctccactgcgcacccaaggactcaccacctttaccactaacaagctctgccagtttaatgtacagttactctgtaccacgtcctgggctgggcactgcagttcctgggaaaatgacgcagtccaggccctttaggggaagcctgggaagagggaactcagggggattgggaggatggggtgggtgaggctcactccctgtcaagctgggcaaagcgccgtgtctgagaggcaggcagctaaccgcgagccggcggcgttccatttacaatctggtgagcctgtattggtataactcgtattgtgaggcttttgagatatcttgtgaccttgtgattttccccgtctttggtgcttttgccccctgtagtgacaagcagttaaaaaaacaaaaacagaaaacactcagaagggcagtgcttgctcagggatctgcagacagggcagatgtcaagctctcacccagttctgctgtcgaatggggtgcagggaggggaagagggaccagggcctagcaggacaggggcagctgcaagccccacctagaagtaccctggtatgataggctctggctaggagcgctgcagtgtcacgaaggcccccagggagagctggatccctttgccctgatcctcagtcccagtctggagcaacctacaggccctggaggagggggcaggactccagtgcccttcccacgaggccctgctgtactgacctcgaatctgcaggttggagaaggtctgcacgggaatggtgatcctgaaagaaagcagagggagagggctgcccgggctgcctgggacacccctaggctgggtcttggtgcggggccatcatgacaacttgaacgcccttttccttgccaggaaagtctaactccatctcctagctttttccccagcagccaacgtgctatctggagttccaaacgtctgcaaggggcttgagtgttatctgggaggggcgcatgtctatctgaaggaagatggaaaagggaggggaaagtggtgaagaaagttccaaggaggcagaagagatgggtgaggtgaggagtccaatcttggctgggaagatggggagtatgcctcttagtttggagggtgacccaagtccttggccttgaggcctaatcaatattggttgaatccatccatccattcagtcatcaaacatctagtgactgcctgctatgtgtgaggcaggcactgtgctgggcattgaggtgggaagggatctgcacacaaggctgaaaaagactcagtccctgaagggagcaagatgagctctaccgtgaggcagcagggagacttccccaggggctgtgatgagggctcaccggttctcctcgccctctagcagcttcctgtaggtggcgatctcgatgtccagggccagcttgacattgagcaggtcctggtactcctgcaagtggcgggccatctcgtccttgaggctctgcccctcttcctccagccgcgccagcgcctcctgataactggccgcctcccgcacgtgccgctcctcctgctcgcgcatctgcctctccagggactcgttctgtgggatggagccggccggtcccgcggagccccgacccgacttggggaggtttcgaggcccggcccccggccccaggccccgcctctagcccgggggtaacgttcaggccccgccctcgacccaggtcctcgtccctggcccttctcccctggcatctcctggggtggccgtccctgctccgcccgtccccgtcctgccctggccgcgctcaccgtgccgcgcagagactccaggtcgcaggtcaaggactgcaactggcgccggtagtcgttggcttcgtgcttggcctggcggagcagctccgcgttgcgggcagcagcgtctgtcaggtctgcaaactaggtgggggacacatatggggggctgtgtgggcccatgggcaggcacgggctctgggaaatcagggaggtgagcagcaccccagttaaccccaggacgttggccctggctgggacttttcccaacaactgtgacccatggatgcgggcagggtagcgggctgccagacctcagcacctagcacaacacctggtcagcaagcgaatgaatgaacagtgccacagaatccagaaccttccacactgacagctgcatctgcgggactgaacgctgtcgtcttaggcgagcggaggcctgggtgttttgtgtgtttttgtttttttgttttttttgttttattttgagacagagtcttgctcttgtcgcccaggttggaagtcagtggcacaatcccgggtcactgcaacctctgcctcccaggttcaagcaattctcctgccccagccacctgagtagctgggattacaggcatgcgccactacacccggctgattttgtatttttagtagagacggggtttcaccatgttgaccaggctagtcttgaactgctgacctcaggtgatccgcatgcctcggcctcccaaagtgctgggattacaggtgtgagccacctcgcctggcctcaccctgggttctaatagccctttctcccctgcctgcagggaggtcctcccagccccatcgggccctcaccctgctcagacaccagtggcttctgccactcacactcctcagctaggtgccctggctaggctagcatcttggggccctgcctctctgtgcttttctgcctccaggctctgtcctccactaggaatggccctcccttcttctcttcctgtccacagcgtgcctgtcctgcctagcccaaatgccccctctacagtgtctttcctggctcccacactacatataagctctgagctgtggtgttctctacgggcactatgtttgggtgcacgtcaatatcacaccttccaggtcagacacctctctgtgtcctggggggtgcctggcatatggtagaggctcagtaacccaaaacagactggcagaggcatggaatgcaggctcccaagtgagatgtgctagagttggaaatccaactctaccacttaggagctgtgtgactttgagcaaattagttaacctctctggacttcggctctctcatctgtcaaagaacagcacctacttcatagtaaggtaatccatgaaaagcacagggcttagaacagaacagtatcagctactactaataatagcaatagtagcagtaataataatgggtacttttgaaagcaatagtgcctgtgtgaccctgggcaagccatctcacttctctggtgaaagtcagtcacctggagaggatattctcccagcttcctccaccctccttcccccattctcttgtacagagcaagaagggctgcctggaggaggcaggctggcccacaggcagggctaccttggagcggtaccactcttcggcttcatgcatgttgctggacgccattgcctcatactgcgtgcggatctctttcagggctgcggtgaggtctggcttggccacgtcaagctccacatggacctgctgtcgggccagctgctcctggagttcccgaacctcctgaccagggtgagagaagcggtaccagggctcagggtacaggccacagctggggttccccacgccattgtgtcctcttctgcctgcccctcggccaggagttcgaatgctctcttgtctctttccgtctcccttagtgtctttctgtttgtctttcatttcctgtctctacctgccaatctctgtttctctcctctctctgagtgtctctctcagtctcagcttctctgtctctgtctctccctctctcagttgcaatctctgtgttgagctttcctccctctgccctggcctcacctcctcgtggatcttcctcaagaaccggatctcctcctccagcgactcaatcttcctctccagatccagacgggccagggtggcttcatctgcttcctggagtggcaggaggggtgaggagtagagggccactggggccccaggctccttctccccattcctcagccttgccttacccctccttctggggcagtggggagcagcacattgctctggcgggctgagcttgggggctgtgtttgggtgggtggccatcaatcctttcctccctcccctgcccctcccctccacctccctgacctgtctataggcagccaggttgttctcggcttccagcctcaggttggtttcatcctggagcctggagtggggggacacattcctgggtccaggctcttctgaggacacttgaatacctgcctcagtctcccttgaggcagctgtcacagagaccacccccacccaggaccagtagagcagcaggaggattaagggttggggggccttagacagaggacttgtctggaggatgagcagatgtgggcttttgccttaactcattactaaggtgccttatcagggttggtgcacctgcttctgctcacacaggcgcatccacaagcatacactcactgttgcacacacacacacacacacgcacatgtcctcctgcacttgaaggcacacatgcatgtcctgtcagctcagtgaagcgccatgcccctggggattcctctgatcccaggtaaccaccttttgaaatgaattttattatgaccaccgcttcacagctgtgcaagtcaaagtaacttgatgggggtcacaagctggtggcaggcagtcacctgtgctttgcgcccagacctgcctgctctttccctcactttcttcaccccagaatccaatctccctcatggacatcaaccttctccgcttccaactcctcctttatatggacacaggctcagaataggtgagctcgctgcccacagtcacaaagcccagccatgaatgaaacacaggggccccgctgctcctgcactgctttccccagtagggaggtgctgaggggaccctggactcctggcagaaggcatgcgggcatcagatccccggggccctgggcctgtttctggtccctcccatcatgttggggggcaaggatagtgccccatcaagaggtagggaggcccagggagcagggaggttcggcccctccctgagacttctcgggcactccttcttggggattcagccccttctgctcacaaggccccccttccccatcccctcctcacttctgcctcacagtggccaggtcctgtgccagattgtccctctcaacctccagccgggcgctgttggcggtgagttgatcgagccgcagccgcagctctcgcagctcagcctggtagacgtctgccagcttggtgggctccttggcccgcagctggttcagctcagcagccagcgccttgttttgctgttccaggaagcgaaccttctcgatgtagctggcaaagcggtcattgagctccatcatctctgcccgctcactggcccgggtctccttgaagccagcattgagtgccccagccagggagaaatccacccgggtcgggagtggagggggcattcgagccagggagaggcgggtgccaggacccagacggcggccaggagccaggccccccaccatcatctcccctgaggagacgtaggagcggcgagcagcggaggtgatgcgtctcctctccatcctgctctggctctgctcgctcctgggatgcgagggctttatgaaggagtgggctagactggcgatgcccgggtgcccctggcaacaccccctggcatagcctgagggggtggggttgggccgcagcccagctatggggagagctcccctcaccccactgaggtcactgtgcccagaggcagagcttcctgggcacgccaactcctgcatgaggcaggtggtacctggagccagaccatgggtctggggccctgaccgctgaagcaagaggaccctctctctaggaaggtgggtcaagaaagggttggttggaccatgatgaatacttacaattattatgcatcaattaaaaaggaaggaaagggctgagtggggtggctcatgcttgtaatcccagcactttgggaggctgaggctggaggattgcttgagcccagtaggttgaggctgcagtgagctgtgtttgcgccactccagcctgggcaacagagagagaccttgtctcacaaaaaaaaaaaaaaaaaagggaaggaagggctgtaccagatgacctctgacctgctttccaactttttgatttcataacccaggcattatctcactcagctgtaagtgcctgcaaggtgctgggaatttggcgaagaatgaacctgttctgtaccctcaagggccacctcatttcctactaggcctcattcccagcagactcctggagtccttcccttgaacacagatgtcccacattcctgctctctgcccattcattccctggagttctggggctgggggctgggattggacaccagccctttgtctaagggtcaatcatggcctctatgtggcagtggaggtcctgatagggcaagagggggccggcactctcttgccttatcaggactttagcccctggatctgtccctccaggtcaccccttccttgtctggcctccctgtgcctctctcccagagaccaggccttgacagctccacaaagccgttacacatgagctggctgtgctggctcgtctttattcctgcagcgccccgtttccctggccacccctccgtctcccactggagatttatttcctcgagttcccacacatcagcctggagagatgggaagaacctctggggatggatgggtttggaaacgctggagccactgggcccaactaggagcctgagacctgggccctgttgtccctggagacttcaggtccatctacgccctccactctggtcccacagggtcagaaccctgcccagtcccctcacccatttgtgtccttggacttctgggaagcagacagccctcctctccccccctgccacccactgtccatgcctgggcatcccctgatcccctttcctgggcacaggctgaatagagccttgttctccaccgccggtggcgccacacagcaagggcagcccctagggggctgtgctgcttttatcccaagatgccaggctgtcaggctggggtgcaatgcaagccccctgctcaatgggcttctcggaaggcatttgaggggggctggggtgcggcgggaagcaggcactgtgcccaccccgaacattgtgtctgtgccaaggtgagtcattcactgggcatgaagaggaggccctggggggcggccagcccaatgctgccaggtctgcttgcagacaaggcctggctgtctgcctcctccccagctcacagagccagctcaggcccccgagcctctgtcagagcagcgtcccctactccacaccaggatatgttctttttttttttttttttttttttgtcttttgagacagggtctcactgttgcccaggctggagtgcagtggcgcaaccacgactcactgcagcctcaacctcccagccttaagtgatcccctcacctcagcctcctgaatagctgggactacaggtgtgtgtcaccacacgtggctgattttttaactttttttgtagagatagggtcttgccatgttgcccaggctggtctagaacttctgggctcaagtgatccttccacatcagcctcccaaagtgctggaattacagttgtgcgccactgcgcccagcccagggtatgctctgcatttggacatgtgatggacagactgcctcctgaggtctccctctgtgagtcccagcacagagagggaggtgggagctccttaggctctagtcacatctgacctgggcgtaagcagtgacataggaaagagcatcttgaagacggggtgagcgcccagtgacctttgatcctgctatgaactggggacctggggaaggacaggaggctttaaaggaagagcaaggctgggcatagtggctcatgcctgtaatccgagcactttgggaggctgaggtgggcggatcgcttgagtccaggagttcgagaccagcctgggcaatgtggtgaaattttgtctgtacaaaaaatacaaaaaaattagccaggtatggtggtgcactactgtgatcccagctattcgggaggctgaggtgggaggatcacctgagcccaggaggtggagactgcagtaagccaatgtcgcatcactgcaccccagcctgggtgacagagactctgtctcaataaataaaaaaataaaataaaataaacaaaatagaaaaggaagactggggataagctcttgtctgaactctgtctcatctctgtggctaggagtggcccgcctttccaggctgcccagcaagtcacagcatgtagccttcccttttggttcaagggaagtctagttaaaataagggcaaagctgtcctagagagaaaagatgtgatgagcaggaggtgcctgtcattgaagctcagtgaactgtccctgtgtatgtgagacacaagcttgtttcagcatcagcagttggagtcccccagcttttgccatcagccacctccgtggacccctgtcataggcccaggtgcatcctccaccccttctcaaccctcagacctttcctcacactcaacccttaactatcttgtttttgttttttgagacagggtcttgctctgttgcccaggctagagtgaagtggtgctatcacagctcactacagcctcaatctccctggctcaagcgatccacccacctcagcctctctagtagctgggaccacagagatacaccaccatgcccagctcatttttgtattttactagagacaaggtttcgccatgttgcccaggctggtctcgaactgttgggctcaagtgaccctcccacctcttcctcccaaagtgctgggattacaggcatgacctatacaaccggtacatatagatcacgcctggccaacccttaactatctaaaggtgtctgcacagagaaccaaagatacagacagatttggtcgtggttgtgttccaaactttcattatctttttaattaaatattcattgtagaaaggtcagaaactatagataagcaatacaaaaaaatgtaattagccatcattttgccacctggagataaacactaccagattttttccacacatatataatcatttttttcaaaatgggctcatgccgtacaaattattttgtaatttgcttttctcactcaacaatatgttgtgaacatctttccacatcaataaatatttgtctgcatcatcatttaacagctgcatgattttccactatatgcattcatgtaccaagccctagtggtggacagtatgacagtatgttctctctctctctttttttttttttagagacaaagtctcactttgccacccagggccagagtgcagtggcaccatcatagcccactgcagcctcagacttctgagctcaagcaatcctcctgccacagcctgccaaggagctgggactacaggcacatgacagtgtgcccagataattttttttttcagagaccaagtcttgttatgttgcccaggctggtcttgaactcctggcctcaagtgatcctctggcctcagcctcccaaagtgctaggattacagatgtgagccgctgtgactgtcctctctctgttctaaaccacactctgatttgcatctgctgcaggcagacacagcaaacagagaagggtaggccctcagcccgtccagcctccacccaaaccccccatcctcctagcctggctcaggccccattctctggggtgcctcctctcctgcttccccaaatggaaggccccaacttctaaagcctctggccaaaccctagactgccttctagactgcacagcaggataataccagccatggagagagaagtctggatgccctttcaaggagcctacagccaagctgtgcctgcttcaagctgaggtgaggacaagatgaccttcctgagcccctccctcacatcagaatctgctagatgaccttctgcttacagggtaaagcccagatgcctcctgggacagaccagccccacatgtggcatcaacccacacacagggtgcctggtgtttgccaaataggccagcctctaattcaaacggcagttttgccacatgactgctgcccgctggttctgcttgggcccttggccctggcccagtgcctggcacagcgtggtggtcagcaagctgggtgaagagaacacagtctctctggctgagccttggtgaccagcaagtctgttcatccatggcctgtcccgaggaagggaactgagcctggtggccactagatggtggtgctcagctggtcaggtgtgagccgccacagccaccgcagtttagaggcagggagaaagctgtaggcggagttttctaaaacccaaatttgtttcacccaggggcatcacccgctttgttctctagacttgactctgactgctatagcactgtcctcaaggagagggagcaaagccttggccactcagtagctgtgcagtctttgatgactttaagaaccttgcctgagtcttcatttccacgtctgtaaaatggggattcaaccatgcctgctccccaggtagttgtaagaataaaatcagtgaaagctgaacacagcaggtgcttgacaaattagagcttccatttcataacacctaccaggagctttacctatcgacatgttagcggatctgcgatggggttggcggaggggcaggagctgggacctctgaaagggcttctgtatcctgttaactcctttgggagtatgtggacatccctcccccaagggcagttacttggcagtgtggacaggacagagagcagcagctagtgaagcatgggggagagccagcactgtctaccctcagaccacgagttgttggtggcttcatctcccaggggacacaggcaagttatctccgccggccctggagactcagagtactgagactgctttcccacctgctttcttggctctctgactcccccagtgggtgctgttttctccatcctcacccctccccatccctagacttgagccccacaactctatcccgtttgaaaagctctgtgtgtcacccctgcttgggtgtgggtctcatttgcatctcagcctgaagctttacaaggagaggggccatgcctttcccccaacagatggggacttcctgatgctaggacctatgtcttcccagcaaactggggtctctctaaggacagtgtttcccccaaccccaggctaaagcacccacaggacaggagtcatcctcttcccttggataggggctccccaatgctagaacccatggctcattgtcagatgggagctccttgagggcaggaactgtctcccattccattggagagggggttgcctcagagtagggcccattccttacccccatcctcagcctgtgcccagccaggctctgctgtctagaactgactcctgtggctgcagaaaggttcctggctgaaccccaagtcccttccccttgctcttccctggccttctcagcattggttcactaaccttcacagaccccaggctgctgcactggggttaataagctcaggcccgttcttccttgcttctccccaccccagccagggcccactgtagcctgccccccgcgtcccagcctgtaaccccgagagcagctttttaattgctttccctgatctgctctgttccccactcccctctgcctccctgattggctccctctggagggtgaaaggcgaggaccagatgtggccctggtgggaggagcggactggcgggtggcctgttatttccagcctattagtcctccaaatggacaggatgaaccggagaacggaggcaggagggctgcatgcgagctgtgggaagccctcagggtgagctggaaaacacagccaccatctctaggcccctggggtgattcccctgccccacattctttttgtttttgtttttgtttttttttttgagacggagtctcactccgtcgcccaggttggagtgcagtggcatgatctcagctcactgcagcttctgcctcccgggttcaagtgattctcctgcctcagcctcccgagtagcggggattacaccatgcccagctaaatttttgtatttttagtagagatggggttttaccatgttggctaggctggtcttgagctcctgacctcaggtgatccgcccgcctcagcctctcaaagtgctgggattacaggtgtgagccaccacgctggccctcacattctttatctcaagccctcctggatccttcttcacaaagaaccatggaagaagggaagatgaccgtgaaccaaattctagctgggagccaggatcccccagacatgaccaagagccaaggggacattcctgggagaatctgggggtctgggaggcaggactcctgagttagtagccaccacggaggctccccaggtggtgacgaagtcccctttgtgggccaagctgatgaccgtgtgtaaggggtacccagagagaaaacccaaccccttctccttggcagataccaacaccgatggagatttggacttacactcaggtgataggaacaggtgccatcctgattccgtgcatggagggaccatgtcttgttctgttttcagcccctggcactgagcctgattctctgaactgggcaggatttgtaccccagggtgggggcccaggcgtgagctgtgggtactgagtcaagcaaggaggtgggcataaaaggcctggggcatgaggatttctaaactcatagaggtggagtgagaggcttttccaggcctttgaggtggaagaggcaggatgaggcagggagcggggggcgttagaccaggctgggccctcagcagatggggagccatcgatcgccgcgtttcgtggatgactctgtttatgtaagaacaatccaatctgagtctcattgccacccacggaggtcagctgggagctggctgtcagcttgctgccccctggatcccctgccagctccctgcgaagctcaaagctcagaccagacaaattgcctcctggcgtggggacaccacaccgcgagtgagcactctcagcccgacctcctgtgattgagggcaggagccccatgtgtttgactccatcggcacagagtcgttgtgaatttaatgggttacctgggagcacattttgcaccacggagccacaagtgtttgccgagtgaatgaccggctgtagaacattcttgtcaagagtgacctcttccacttgagctgcccccggcccaggcaaaattctccctcatgcaacggaccctattgggtgaaggttgccctcctggccctcattaccagctgccttgccctgtgcctgctgcctctgcacttgcaggggtgatggtgatgatcaaataagataatatatgtgaaggccccaggaaatgggggatgttattcaatttgaatccaaccaacactcagtgaggcctcctgaggtcaaggcaccatgccagggcactgggggctacgatgatgtgaatctgtgactgcctctctggaaatcatggtacacagtgggggaaaacttcattaagactaattggaaaggagggaaccccaagcacatgaaatgtctgtccttttcacttccctctggaagtgaacagacattgttcacttctggaggaaagcagcttggtgtgatgcagagaagcagacctcagatccagaacgcttgaatctaactctgggcaagttttgtgaccctttcggagcctatcattatctcccttatgaggtggcgcagctcagtgaagggcctggcagccagtgggtgctcgatgcttctggctgttctttcctctactccaaaaagggctcagaggccaggcacggtggctcacgcctgtagtcctagcatcttgggaggccaaggtgggtggatcactttaggtcaggaattcgagaccagcctgaccaacatggtgaaacactgtctctactaaaaatacaaaaattagccaggtgtggtggcccagatctgtagtcccggcattttgggaggctgaggcaggagaatcgcttgaacccaggaagcagagcttgcagtgagccaagattgcaccattgcactacagcctgggagttgcagtgagactctgtctcaaaacaaaacaaaaccaaaacaaaaagggctcagagctgaggggctgacccggtagaggctgctccccgagaacagccaggactcacttgaaattagcagcatttatttacatgctactcacaatgctctaaatacctttaacatgtttgttttcagaagcaggttaaacacagactcctgtaattttgtttacactattaattcattcagccaaccatgtcttcatggggagaacggagggaaacttatgtggcactgtcgcccaatccaaggaagtggagatggaagtcacgagccaggtggacgggtgttggcagcagactgcactggacttaagcctgtggggattagcttggagcctcacctaagacctgggggccactaagaaggcagaactcctagcaacccaccgccaaggccgtagaagggtggaacagacctccaggtgcaattactcccaaacccacggagaagaggaggccctttagggcgtattgggctgtgaagtgaagagccgggctcagacctcaggctccaggaggaggcagagtgagaactgttttctgtatatactcagaagtttcctgaggtcttaagagtagcaaggtgagaaagggaaggtgttgctatcctatctaggtgtacagagagacacacacaccaaggatggagacggtttattgttataccaaaaatatatgtatatatctatatatatatgcagaaataaaggatcagaaggctataaacccaagtatcattagcatttatatctaggtgcagcattaagcctgaattcccctttacactttattttacactgaacgtgtatcctatgtacaatagagttaagcaataaagctgtcttcatttggaaatcaaggcaccattatcatccacatcttcaccaggactgtggttggggaccaaggggagtagggatgaagatgtccctctcagaaaccaggaagagccaagccgcgactccccgctccccaacccatcctcattcctcctctactgcctgtggccatcaccgtggggcctgtgttagagacaggtggggaaaagagcccaagagccgtctgcctgcacagagggcatcataaatgagaggggaggccgggcgcagtggctcacgcctgtaatcccagcactttgggaggccgaggcgggtggatcatgaggtcagatcgagaccagcctggctaacacggtgaaaccccatctctactaaaaatacaaaaaattagccaggcgtggtggtgggcgcctgtagtcccagctacttgggaggctgaggcaggagaatggtgtgaacctgggaggcggagcttgcagtgagccaagatcgccaccactgcactccagcctgggcgacagagcgagactccatctcaaaaaaaaaaaagatgggggaacatggcagcacctttaaaacagcaacacgggccaggcgtggtagctcatgcctgtaatctcagcactttgggaagctgaggcaggcggatcacctgaggtcaggagttcaagaccagcctggccaacatggaaaaaccccctctctattaaaaagacgaaaattagctgggtgtggtgatgggtgcctgtaatcccagctacttggaaagctgaggcaggagaattacttgaacccaggaggcggaggttgcagtgagccaagatcgtaccactgcactccagcctgggcgacagagtaagactccatctcaaaacaaaaaaaacaaaaaacaaaaaccaccaaaaaacaaaaaacagcagcacattaacactcacaaatgaatatgtacatgccaagaagctgagtgtaacaggagattaacagagggtgagtagcaggatggatgtctggggagggatgttaatacagcaaaggtgtgttggcactaattgctcccaggtaaggaaggcaggtccagctcctggtgcaggtggctacaggtccaagaggggtatccagcagaggggccggtaggttaggacaccttggtggtcaggacattctggcggtcaggacaccttggtgacgccgttccctgctgagagtgctctccccaccctgatgaggtcctttccattcctccggttgctagggcacaggggactcaagggcagctctgcaggccagttggatgggtggcggggagtgcagcgaggaaggaaagtgacgctctgtccccgtcctccagcccacctcccacctgtctcatcagcagcatccctgagatgcttggcaataccctaggccctcctttcttctgggtctcagctccccgtcccctcctccttcttgtcttcatcggcctccatggcccaggctatccctgtccctagtgccagtcacctgggagtacaaggggcccagctggcctcttcaaagtgctgctggggaggcgggcgatgcggctgcggccatgggagactgaggaactgagggaggaaaggagggaaggtggaaggttacggccctgtctctggactatgggtgtgcattgaagtggggcatataagtacttgacactaagccctgagagcaaaggctgctgggcaccagcaggagcttccagagctggatctaagggtgggagaggcagtgtgtagggttggggacacaagagggaagtagcagtgaggatggagagtccctttgctggattaatggtgtgcaacatctccctcatggataaatgggtgctgagagcctccctcatggatcagctctggggtgatcctgggatagcaagggccaaggaaacctcaataggagaactagatgcgggccctgctcacaggacctcagctgcttgctccgggggtgtagagacagagacactgggggcccagagtcggcccaggtgtctactgccctggtgagagcgagctccttctcccagacagctgacacctcccaaacctcacctcgcaacgcgcttcttcttgcaggcagaggtcccagggagggaagatgttggcttggggcccttcatggtgaacaggggcacaggtgccctggggagggaggacagggaaggaggctgatcagcagggaaccggaagcaaggccagccacttcctccctccagcccccagctcgggcatgggggagggtggttggacaagatgacctctgaggtttcttctacaaagaggtggattcctctctctgcctggctgacagctgagtgacaggcctgctctgggaggacatccagatgccagtttctggtgcacccggggaactggagttcaaacaatttcacccttccacctgcccagctctgcgcttgttaccgagagctgcttctcgggctatggaatgggcgggtgcgtgggtgggcagagcctgccagcctctgccccacaggtgcaggtcagtctgccactggttcttggccttggactgtcttgagcaggctgctgttcccctcctctgccatgtgtgtggaaagggggagtgacagcttcgtcttctcactggaaaatactgaactgagttttctaaggaccccctttcctgttccagatgctgggccggaggccaaaatctggagtagaagtggcagaaagaggtatttcccagtggaacatagaatgcagcccaggccaaagagcccaagtaaagagaggaacagaagtgttgggttcccctagtacattcttgttccctgctgactctttccaagttggggtcccattagctactcatgagcatgctacaaaccagcacagagtgggtggctttgcagcatggacagaccaggcaggggccccaggagaagtgacacctccctggcagctgttgggcctggggagcaaagcggatcacaaccaaagtggaacagataggaaccgtcccagctccaaggctgtcctccatacttctcagcagcaccaagaagtcccttgctgaccactgaccactgacaggaggggtggagcgagactgggagacccacctggggatgaagggctggtccagcctgctcagctcctggggtattttgtcccagccaatgcattcatggaaactgggctttgagggaggctcctcagagagatcaaaggtggcattgaggtctcgagtgggcagagccagcggggtggagcagttctgcatggcggaagggcccaggggcacccggcttttgatgactgtggctgggcaaacgcgaggggaatggcagggggaggaggccctttctcctttgggggtgctgggcccctgtgaaggttgggtgtcaggcagagaccctctccttaggcagggcaggaaggactggcgctggcgcttggtgccccgctttggggccatgggactgtctgcctccaaggcgcttggtctcctcctcttcttctccatgggccatcgggacccctgggctggggtgcagttgggtccaggcgggattcccagggtgtgcagggggccactcagtcgcctcgccatagtccgggtcacagggccagtgtatcctggaggctctgggcagagaggagacggcacagggactgcacagaaggaaggagagtttgtagaacttggggagccagacactggagacatgaaggagcccataacccctcaggtctcctggggcctctctgtgtgcagaagtctaggatcccaggggcccagcctcctacagcagcaaaacccagcaactgaggcccctggacaccccttggccccagtggggccttgaagacagcaccttgaagacaggcaggggagagcaggatgagactcacttgactctgaacacagctcctgagccagaggtgcccccctggccaggcctgaagtcctcaaggcctctgccccaggctcaattttttcctcttgcaccagctgctgtagggtctcaaactctgtgatcatgtcgggcgtcaggaggttggctgcttggagcagggagtactgccgctgggcaacgcacagcacctttagggccaacctggaacagaagaaaggggattcccagccctgctcagactcagcctgaccaggagcctctatgccatgcacctgtcctcatcactccagctgtggttgaggagtctgaactggtcccctggctccctcctgcctcaccccagacaggctagccagactcaccaccctctcagccacagctcctgctctgctattgctgaaggccaaggccgaccaggatggccacgggtaatggtgggaggtgtcacccactaaacacgccccatgacaaagacagtgatctgagaagtagggaaatggcactaggtggccctggactcagaaggtctgagtcttctcttggctctgccacctactagagctgcaatcatgagttcatctaccctaagggcagtgcaaaggggcagttaagagcccagctcaagtcagactgccagtttcccactcacatcctggctccaatacctcccagctgtgtgatcttggatgcactggttaacctcagtctccacaaccttagaatggggataacaaatgcccccacctcatagggttattggaaagactgaatgagttactttacagacaaaatgtttaaagaatacctgacatgtaataagcactgtaggtctagctaactattgtttcctgtaaaatggaaataataccatcttgctggttaggataagaggagattatgtaagataggctatgttcattgtggttctaagaaggccctcaaaaacgcattccgtctatgctttctatttaatgactgggatcctgaaaaagtatgtgtgaatcaaggcgtatttcacaggcactggggggctacttgaaggaaatgatgaaggtaatgagattattgatgttgtaaatttagattctaataaagcatattttctttctgtaaggcacacctatgataaaagaataaacacaattatctcagtgggaattatccatggaaaatggtttatcctcaggtagttctactggcctggacatctctgaagccccctccactgccctcagtcagggtgtgctgagggaacacaaactcattttataaagcagcctcaaggcctttttgaaaaaaggcaggatataaattaaaatggacacagaggaaactcattctatatctgcacgggccacacattacaaggaagattagacaattgcgaagcatgggcgtttgggggaaatatccaggctctggccccgtccctcttgctatgtgagcctggacaaaggcttcagtgccccatctgacaaatggggagctggtctaaatctggagttttcaaattaggtttcaaaaacccatcagacagagtaactctgttttgactgttctatgcattagacttcagcataagatttcatttgaagaaagtattttgtagctaaaaacaataaaaaaaaatctgaaaaaccactgaactggaaaatctaagatctactcagtacctagtggtccaagattctaaattctaaaatcaaagggaaattattttcaacgatctggctgttaggacgtttccaaacatggagatttgtcacattttattagtacttcatccccaagaagtagggagaccgggggctatgatccccagtcaaggccaaggttgaagcaatttgttggagaccacaaagccagggcagaaataaggaccctggtgtcctctctccttataacaggggacccctagcagaggggccctgggtcatcggtaggagctcatggttgttccctgggagatcagggggatgtcgcaccagagcatccttgcctctccagggccctgggcaggacctgataagcaggagacagataatgagctgccgattattcagactgcagcatttttgctgagtcgggaacagacactccccaacaagaaataaaattaaacaggcccttctgtccagaagctttaaatacactgcctagcatgaagcgtgctggggagggaagagcgggatggcagtaacagagctaagtggcaggggatttaggaactaggggccaaggagaaaaatattagcagcatctttctatgaagcatagaaagaatggtccaaaatccatttttctttggctttgattagtggtttgtatttacttctgagaaaaaatagccgcaatcaatctgttgatgaagatacatgaaaaacactggctcaggaaggctgtcccttccccagcctgacgttcagcttcccttggctgtcccctccttgctgtggaggggcagcctggcctcagactggaaagcaaagcgtaagccccagccgccctgccctgacccagggtctgctggctgcctggatgtactctggcattttgcttccctctcctgctaggcagccagctatgtagaggaatacatagaggtgataagttaatcaagtaggtgacgataacaacaaggaggtgaaaccaggtaaaggacagtgctgatgaagagacagggcttttgtgatgtgcttaacaccaattcccacacccagggaggctgagcccattgcttcccaccttgattccagaatacagcaagaagatacctactgcttagaacggtccccatccagttcccgtgctgagaagtggcccacgactggcttgggctgcagggtcaggcgaggggactctggcagtgcatgtgtggggttctgctctggcatctgggttggaacctaaagaggaaggaaaaggcacaggtagaggggccaggatggcctcctcatctttataaacagcttctaaaatccttccctcctacaagagtggaaatgacagctcctagaatgaccaggtcctggtcacttccaaacacacaaggatctgataagagtatttcttcttcctgcacagaatctgaaatcctcctaatgactaaggtgcaagacatccacatagagacgggactaaagggactctgagtcagggagaggcaatttttccaatatcccaccagctccaagccctcccgatacccaggcctcacacccccaagtcctacctcctcagctgggccttcatcctcatcctctggggactgctcctggtctgaagagttcccttccatggccctctccacctgggcctccatccccagactctcctcttgaagggctctaggccctgcagggagctctggggtgcagggctggctgggagggtggggtggcaagggggagctgggaaggctaagcgggaaaggagggtttgagaggcaggatgtgggccaggtgggagagcagggagcgggtgggatctctgtggcacccaggtcgtatagagtccataagggacagatgcttaggtgacaaatgggcagtagctgagggtaggaggagtcagggattttctggtttgagagacaatgacacacacccctaagttcaccttctctcgaatagtaggccctgctcttacgggctggggtgccatttactcattggacacagcactctaggtgacagtcagttgctgggcaggcactgggtgcaaacccttaaccctagggattggagcagaagcaaggagtcctagtcctccagaaactggagaagagggcctggctccccatcctggctgagctgcagggtgggggcgggaatgggcagtggaactcactgttctggtggtggtcccgacttgggagatcctgggaggtcctgtggtgggggctggcctcccccctcatacacttggagcttcttcctcagagcggctacctggaacagaagcagcccagcccctgagagccccagctaagcacaggaggggaggggcagacagagcccccgccacaccctcaagctcctgcctctggctgtcggccctccagcctgcccccaaggcgggctcctcacctcagcctggagctgttggcagatggtagcatactggctgatgtgacagtccaggctggtcacattgctcttcagctgagatggggaacaggagagagatttatttgttcattcaaagcagcttttatcagccaccgccgatggccaggcactgcactaggtctctcccacgtccccatgacccaccctcgcaagtggggagacacagcagagaaggtcagtatcatgcctgagaccacagcgaggggcagaagacccctgactccacgactaagaccttcttgccagggttagggtgttcttgcagtggtcccaggagagccagggctccctggggggagggaggaagagaggggtcaagcagatgtggcagaaagcatatattggtgtttatgttttgctgaaaatatgctcccactgctaaaaacaagtctgaactagaccactggccaatgagaggccaccctcctgccgtctcccttggttttggagaacatcttgcccctctcagctggtggcttcccacccagggatggggactgtgtcgcttctatcacaaagactctctgaagacagaggaacttcttttttttttttttgagacagagtctagctctgtcgcccaggctggagtgcagtggcattatctcagctcactgcaaccttcatctcctgggttcaagcgattcttctgcctcagcctccagagtagctgggattacaggtgcccaccaccatgcccagcagatttttgtatttttagtagagatggggtttcatcatgctgcccaggctggtctcgaactcctgacctctggtgatctgcccaccttggtctcccaaagtgctgggattacaggcatgagccaccatgtccaggccagaggaacttccttcctctgccttggggacacttggcccagggatctattggagctgcctgggtcccaccctttcctgctccccggctggagctgccccacgcccaagccggccctggctggcacgcaccgagagcctgatctccttggcccggtcggcatatttgagggtgttgtacgtgtcctcgtaggtcaggctggaggggctgatggcagcgatcatcactgtgcggcagttgcccccgagggagtctttgagcaggcgggtcagtttgctgtcccggtagggcacatgggtcttgcggccctggggggcagtaagcaggtgtggggtgaggcgactgatggcactgacccaggatggggccctgtggcctttggccctgggttcaggtgctcagttgctatcctggggagaatactggcctgtgctgctttacctttgcatcggccaaggcattgaggacgttgatgagcgccagcagagagcggttgatgttggccccctcccgcagccgctcccccttcgcatgggtgctggatgcccgctctgagccagccaggtcaatcaggctcatcttggccacctggacagcctgggtcagtcctggaacccggtcctgctgcttcacaaagatctgaaggcagatggcaggggtgagggggagatgggcatcaggggcactggtttcaggctctgacccatgacctcacctggaagatggcatgggagcgggaggaagtcgcgttggcatcagtggggtgctgcgtgcggttacggttccccctggtcagtatctccagcagctgctcggctgaggctggctacagaggagaagcccaggaacggggctgtgggttcccggatcaggacttttcccctaacaggaagggctgctcttcagaatctacatcacccccttgctaccaccaccactgctaccaccatcacaggacccagggcatccccaaacagttttgtgagggaaccccaaggacccatggggccgatcatcctacccgagcccaatcccacacctggtggaaagaaagtccttgcaccaccacccccttgtcggggtcctcgcggatggcaaggggccccttgggctccaggaggtcatggatctgttcattatacacctgagaaaggaagaaaggaagaggcctgagggagagcggcccatcaggaaacctctccctagcggctggacaggggagctgaggccgggatgtatctgagacacccacagaagtggcgcttcccaggactgtgttacatgaccacagcagggtgaacaggcgggtgtctctagtgcagcatctcactgagcagtatctatctccttgaggggtgccagctctccatttcctgccaccctgtcccacaccagctcactccaccccatgggctcacttccccccgggtggttgtgagaacaaggcccagggcaggggcagccgacctcctggtagctgatgagcacctcgaagtgcttctcctgctggcgggcctccaggcgcctgtacagttccacggtggtcaggtacatgatgccggggtccccctcccttcccagcatggtgtgtgtcttcccagccccggtggccccgtaggcaaacactgcagaggacatagtaaggaggaggaccccagtgccttgccacccagctcagcccttccctcctccctcaagcccctttccttttcctcctgtgttccctggtccattaatcccactaatcacaccctccatgttcccgctgcagggctggagttctctgtgtgtttgttctgttcccccataggccagtggatttgggatgacctgatctccactatgggtgcgggctatgccttccttctgtaggtgaggcagcttttggtgttgaaggctcacagttatctccctcttaccacttaccctggtttatccccacacactgtgggtgtgatctgtgagtggtgtcttctcccctctagactgtaagcaccaagtggacaggaactgtcctgtctgatttgctgttgcagtcctgggcccagtagagtgcctcccccatagactgaatgaatgaatgagtgtcccacagagcatgatgggacattgtacaaaactccttagtaaatcgtgcccagcttgggggaggcgggcacatgccagaagacacatgaaacccttcccttaggaggaggcagggaggccaggccactgccaggcagggctgaggttctcacctgagcagttgtagccctggaggaagctgtccaggacgctgtgcgtggtgtgctggaacacgtcctgttgggtggccgcctcgccaaagacccggtcaaagacaaacgtcaggtctttgcccttcttcttggggccatcatgggtgccaccccatttcaggccagggaaccctccatcgggctcctcagggttaaacaccagcacccgctcgtccaccacctgaaccactggccgccgctgactgtccagctcccgaggggtggggggccgcacccgtaccactacttgcagcgtgctgtcctccactgccatcactgtggtgacacctgggtgagacatggtggagctgaggaccaatcccaccccaggcctgaccaggtgccccctcagtactccaaggtcccctccacccactcccaatgactggtctctgttttatgcctcaagagagtaaaaatattggtgctgaaaccaattatatctctttctcacttgaaataccatctttgtcatactcaaatgactctctctctctctctctctctctctctctctctctctctctctatatatatatatatatatatatatatttttttttttttttttttttttttttttttttgagacggactcttgctctgtcgcccaggctagagtgcaatggcatgatctcggctcattgcaacctccacctcccaggttcaagcgattcccctgcctcagcctcctgagtagctgggattacaggtgtgtgccaccatgcctggctaatttttttttgtatttttagtagagatggggtttcaccatgttggtcaggctggtctcgaactcctgacctcatgattcgcccacctcagcctcccaaagtgttgggattacaggcatgagccaccgcgccaggcctcaaatgactatattgttagaggcctcttactgggctttctagtatgttccacaaatccatttgtctattctttttttttttttcttacctttcataaccctcatgtatctctgtctattcttgggccagtgccacactgtttccatattactttacagtatgctttccagctagtaaggcaagaacctcttcattactctttcttttctatagctttcttggctattttcaggcatttattgtgctacttgattttaagaaaattttatcaattctacccccaacctagagccctctcctccctcaaaaaccctactggggctacagtttgaattgtattacatttacgtatttattatactgagccttttattttatttttttactttacataagcctttagcagccaagtgtattaaactctttcaggcaagattgtggctactgcctttctttttgttcagatattttttatgtccctcaataagattttatagttttctatctcttcagttagttctgtaattgtccttttaatatatttctcaggtattttatgtacttaattgctcccgtggatggaacacttttccccatttacatttccagctgataattactagtatggaggaacacaactaattttagatattcacacgatatctaccatccccaaactctcttattaatttcatttatttttattagaacttattgggttttctaagtatacaattatgtatcagaagaggaaaaaatttttaccttttcttctccatattcatacccaatatttcatttcttgtctattgcagtctctagaatttctaaaacaatgttgaataataatgatgataatgtgcattcttgttttgtttctgattctaaaggaaatggctttagtgcttccctatttagacattagttttatacaagtagtctttataacattagcaatttcttctattcttgttttacttggggttattgttaggaaagtctagaattttatcaatgctctttcagcatctccatacacacacacacacacacacacacacacacacacacacacatatatattttttttgagatggagtttcactcttgttgcctaggctggagtgcaatggtgcgatctcagctcactacaacctctgcctcccaggttcaagcaattctcctgcctcagcctccccagtagctgggattacaggtgcccgccggtgcgcccagctaatttttgtgtttttagtagagacggggttttgccatgttggccaggctggtctcaaactcctgacctcaggtgatctgcccaccttggcctcccaaagtgctaggattacaggtgtgagccactgcacctggccctcccaatatatttatgtgcttttttctcccttattttgttgctatggtaatttattagatattattcctgatatcaaaccaaccatgcattcctggaaaaaattctaccctggccatagtgaagtttttaacacttaaatagtcagacatgtcaatcttttcttttatagcttttatgtcatacttaagaagacatttcttctccaaggtaataaatcctcttcttatatttctatctaatattttttctttcttacatttaggttgtcatggagatggaattttttttgtgtgtgtgaactgtgtgaggaagtttctaaatatcttttctttctaattggtaagcaattatccccaaggtcatttatcgaatagtgcattcttcctccaccaatttgaaatgccaaatttaacataactaaagtctcatagaaacatgaatttgtggctgggtgtggtggctcatgcctgtaatcccagcactttgggagaccaaggtgggcggatcatctgaggttggcagttcgagaccagcttgactaacatgaagaaaccccgtctctactgaaaatacaaaattaggcgggtgtggtggcacgtgcctgtagtcccagctacttgggaggctgaggcaggagaatggcttgaacctgggaggtagaggttgcggtgagctgagatcgtaccactgcactccagcctgggcaacaagagtgaaactccatctcaaaaaaaaaaattaattaattaaaaaaaaaggaacatgaatttgtgccgggtgcggtggctcatgcctgtaatcctagcactttgggaggccgaggtgggcagatcacctgaggtcaggagtttgagaccagcctggccaacatggtgaaaccctgtctctactaaaaatacaaaaattagtcgggcacggtggcgggcgcctgtaatcgcagctactcggaaggctgaggtaggagaaccgcttgaacttgggaggcggaggttgcagtgagctgagatcgcaccattgtactccagcctgggtgacagagactccatctcaaaaaaaaaaaaaaaaaaaaaaaaaagaaacatgaatttgtttctggactttctcttctgtttcgttatgtccattccttttccagtacctcactgttgtaattactgtggttttatcatatatcacctcattgctctttttcttggctatttttaggtatcttgtcttacatatgattttagaatcagcttatgaacttctatgaaaaatcctgctaagattttaatttggattattttgaatttatagattaatatgaggaaaattggcatctttacaatatcaagtgttcccacctaggaactgatatctctttccatttattcacacctttacagtctttagtaaaattttataattttcttcacatgggtattatatatttcttgataggtttattactagttattacatgatctttgctatattatgaataggctccttattttatttttattttttttttagactgagtctcgctatcgcccaggctggagtgcagtggcacgatcttggctcactgcaacctccgcctcccaggttctcttgcctcagcctcctgagcagctgggattacaggcgtgtgccaccacgcccagctaatttttgtatttttagtagaggtggggtctccaactcctgacctcaagcgatccacccgccttggcctcccaaagtgttgggattacaggcgtgagccactgcgcccacccactccttttaaaatcacattttcaaactccttctttccagaagataggaaagctactgatttctgcatgcagatcttgtatctggccacattgctgaactcccttattggttctaatagattgtcattgattatcttaagtctttcaattaaatgatgatatcgtttgcaaataatgagagttactttctatttttagctcttctatgtttagctccccacctccactgcccattaggaaggtaggaatgggtgttgaattttatcaaatgctttttggcacttgttgaagtgatcacacatatttctcctttaatctattaatgtagagggtgactcaacagatttcctaatgttgacctggtaataattccaaacatatatttactcattcactcttatatcatccccagacctctctccctggtttttcatttctctttcgaaacagcgtaccaaaggtagggatggaatttttggaatgcagcgtaccaagggtagggatggaattttggaatgcagcctggaaaagttcagcccaactctggggatatattgacaggggtgaggaacaggggctgttcctgggcgttatgaatagatggatgccttccaggtaaagactagcttccactggtgggtcacaaatgccaaggtcattcagcaaagaaaagtggggtttctacctgacactctagcaaacagctaaggttttccttggggaatgagacagaactgagctgatttgaaactcctgtcccctcatccctaaacttcttaacttcgtccccatataaaacaagaaaaagatatcaaccaaccataatccttttacatgtatgtaattctattcctgtcccagcaatcagattgccatagtaagcatattagctaagtgctcactgcatcaggaactgttcaaagcaccttatgcatatcatctccttttatccccattgcaatctcacaagatggatactattattatactcatttttcaatgaagaaattgagacagagagggttaagcaatttgcccaaggtctcaatgctagtgagtgatggagccccattccaatccaggcagtctgactacacatcgggctatactgccttatagtgatattatatattatgctacaatgatcacatcattgtaatagtcccttatgtttgtataataattataattccttttatggaattagcgttctgtattctacactttcaaatatatggactgtacctaattttctttttcttttttttttttttttgagacagagtctcgctctgtcgcccagactagagtgcagtggcacgatcttggctcactgcaacctcggcctcccaggttcaaggaattcttctgcctcagcctccccagtagctgggattacaggcgcccaccattacggccaggtaatttttgtatttttagtagagatgaggtttcaccatgttggccaggctggtctcgcacccctgacctcaggtgatccgcctgccttggcctcccaaagtgctgggattacaggcgtgagccactgcacccagctgtacctaattttcaacagagagggttcctgtctcctactcttgcagacctacccccaggaaaccccactttggcacccggggaagggaaggcagagggtgcctgggtccacatttcccagcagtccctgctccccatggggagggctttagctgaggaggagccacagagcagcctaacattctaagcaggaaattaaaaagggcactggcaaaggagtgctcataacctttacagttctctcctcccgcctcctgagggccagtgtggctgagtctgtttgcctaatgagatgttttccttcttgctgagatggtgctgggggcgtggggcacaaagtgtggatgacacttggcatagccgccgctaggatgcctgggtcctggtccctgttcagcatctgaccaagggggaggtctttccacaagccacaccaggtcaatgtcgcatcagcttccctctttgagaaccagagaaaacagctaccgatctgctcccgccccaggggatggggagattaatgagagaatgtgtgtcaagtttgctttgatccttggttggaaagagcatttcagcccaaagtacaagggagatgattctttaataagatcttcaggattctcagccagccacagtcacgtcctgtttctaacccagggcagctcattaaaacccagaggctagtgctctgccaggctggggctgggaagccaagattctgttgttttggggagagcctgctctgcccaccctagtagagacaggtccagtgagcccaagctcctcacaagtccctggagaagaatttcagaggacttgagggaatctacctgcagactctggaagctgaggaacgtagtaggggtgagggggtaggggaagaagcccagcccctggacgtcctatttttacaggcgatgctgtagcccccttcatctctccttcacaaccctaatacacttgtttttttgtccttaaactccaagaggaggaccttcttctgacatagtctgtgtaccccaggtgcctgggcacccggcccagcatgcagcagatgctgaatttgtcctatgaataaataagggccagagaagagcagagtctgaatccaaaaatctaaaaataattattattacagctaacatttacttagtgcttactatgaattagacactatgctaagtgctttacaaatggtgtttaactttcacaacaattgtcatatccctactgtacaaaaggaacaggaggcacaggaacttgtctcccaaatgtgaagtagcaaggctagaacttgaccttctgtcaccaggggcactaccccatccttaggctgttctgccctgcaattgggcttgggtagctcccatctccccctcaccttggtacccacaaaagaacagcacccccgatccactggttcttcctacatgttgtggtcatgcagaggaagaaattgtgttttttttgttttttttttgagggagagtctcgctctgtcgaccaggctggagtgcagtggcgccatctcggctcactgcaagctccgcctcctgggttcatgccattctcctgcctcagcctcccaagtagctgggactacaggcgcccgccaccacgcccgactaattttttgtattttttagtagaggcggggtttcaccgtgttagccaggatggtctcgatctcctgactttgtgatccacccgcctcggcctcccaaagtgctgggattacaggtgtgagccaccgcgcctggcctcttttgtttttttaaatagacaatcataaggctgtaattgatgatagcgttgttagtttctttctaatcttattttatttttatttatttttcttgtcttacatttctggttaggacctccagcacaatattgaataaaagcagtaatagtgagtatccttgcccctttcctgattttataaagaatccttctactatttcacactttgttggtttaaggaaatttgtctccatttctagtttacctatatatatttaaaagtcatgaatggatattgaactttattgaattctattttcttttccttttccttttttatttttttagaccaggtctcatgttgttgcccaggctggaatgcagtggtgggatcaccactcacagcagcctcgaactcctgggctcgagccatcttcccacttcatcatgtcacctacctccccagtagctgggaccacaggtgtgccaccatccctggctaatttttaatttttttgtagaaatgatgtctcactatgccgcccaggcagatctccaactcctgggctcaagtgatcctcccacctcagcctcccaaagtgctgggattgtaggagtgagccaccacaccggctcctattgaattgtatttctgtgcctaatgggatatgtttgctctttaaatctctaaatgtgtaaattatattaatagattttccaatgttaaaccattcttgcattcttgggataaattcaacttggtcataatctagtttttaaatacataactggtttctgattgctaatattttagtaagatctttgcaactacattaacgaaacagattgacttgtaattttttttttttcttttttgagatggagttttgctcttgttgcccagcagcctggagtgcaatggcgtggtctcagctcactgcaacctccgagtccccggtccaagcgattctcctgcctcagtctcctgagtagctgggactacaggtgcctgccaccatgcccggctattttttgtatttttagtagagatggggtttcaccatgtcggtcaggctggtctcatactcatgacctcaggtgatctactgccttggcctcccaaagtgctggtgctgggattacaggcgtgagccaccgcgcttggcccgacttgtaattttctttgtgttatttttgatatcgtaaaatagacccaatatgttttctcttttttatagggacggtttgtgtaaagtagaatcatctttttcaattgcctgtaagtttctggtggaatttggtataggtttttcatgcctgtgaagatacattttaaactaactcagtttcctctatggaaaattgaattcctcaatggaatagtcctagatctagtcaaaatttccataacttcttgagtcagttttggcaagttgttttttcctagaaaattttccaagggcattgtcaaaaagaatgttccattgccgtttctctttcttttaatctctgtaactgaagtatgtccctatttttgctcctaaggtcttttttgtatgttttatttatttctccatcaatattgccagaggtttttaaaattattattcttttctaagatacagcatttgactaaaataatcctattatatgataaaactctatttcattgattctgcttttagcttatttatttattgagacagtttcactctgatgcctagggtagagtgcagtggcgcgatcatgggtcactgcagcctcaacctcctaaggctcaaaagatcctcccacctcagtctcctgagtagctgggaatcacaggcacacgccaccacaccccccaattttaaatttttttatagagatggggtttcaccatattgcccaggctggtcttgaactcctgggctcaagctgtccacccgccttggtttcccaaactgctgggattacaggcgtgagccaccatgcccagtcttatcttcttttatattctacatatgttctctgctgttctgtcttattaaagttggatatttgcctcattaactttcagcttcttaaacaaaatgttctaatataagcatttaagactataagttgccctctaagtatcgctttaactgcatcccacaagttttataaatagtatttttataatcgcttcatgttaattatcttttaattacaattatgatttcctatttgacctacttaagtgtatttttaaaaaatttcaggccgggcatggtggctcacgcctgtaatctcagtactttgggagaccgaggtgggtggatcacctgacgtcaggagtttgagaccagcctggccaacacggtgaaaccccatcccgactaaaaatacaaaaaattagccgggtgtggtggcgggtgcctgtaatgccagctactccggaggctgaggcaggagaatcgcttgaatcttggaggcggaggttgcagggagctgaggtggtaccattgcactccagcctgggcaacgagggaaattctgtctcagaaaaaaaaaaaaaaaaaaaaatccaaacatgggctgggcacagtggctcatgcctgtaattctagggctttgggaagctgaggtaggagaatagcttgaggtcaggagttcaagaccagcctgggcaacatagggagaacttgtctctacttccaaaaaaaaaaaaaaattgtaaatgtggtatttataacgtaattgcttatgtaaaaagattatgttttatacaatactctgataattgtttagatttgttttgtggccaggtagaaaaacaatttataaatttataaaatatgctacatggatactttttttaacttctattttatttttttgcaacagtatacatgtatacttttttaaaaaggtataaatggaattcggttagataatataaagaccaacatcttaaaataactctctagaggtagggaaattcaataatgaaatgggcagagaatgactggatacctttgtacttgaagcatgggatgcagtgactggggaagaaatagaatagggagaagattggagaaagcaatataacattgagatgttctcctctaaactaggcttaacttctctgagcctcagttttccaacctgtacattgtaaataatattagtatctaccccatatatttgtgaagattaaatgagttcattcaaacccggtaagtgctcaatagatattagtatcactgttagaattatatgacatatggcattttcccatgacgatggaggaaccagtgtcttcagtaaaatcccttaagttctgtggcacagaccaggcttaatcttttccatgtcacttcagttccctaaaaggtcaaagctaaggggagatgcatcctaggagcagtaacaaaggcctggtcttctgtcatataaatgttctttcacttgttccttcattcaatcaaacatttggccaggcgcagtggctcacatctgtaatcccagcactttgggaggccgaagcggcggatcgcctgagtcagaagttcgagaccagcccggccaaccctgtctctactaaaaatacaaaaattagctgaatgtggtggtgggcgcctttaatcccagctactcggaaggctgaggtaggagaatcgcttgaacccgggaggcggaggttgcagtgagccaagatcgcgccattgcactccagcctgggagacagagagagagagactccatctccaaaaaaaaaaaaaaaaaaaaaaaaaaaaattttactgcgtgccagagccaccggcacgtgcagctctgcaatcagttcagtagatgggtggaggggggcttacatactcctcactgacatgcagggagtcccaggcctttagttgtagcgtgcagaagagcccaattcttcctcactcgcgagcaggaggacctttcacggggccgacgtacagagggccaggccccggtggcagatgtgcaggcccagtctaggtccagcatagatgagcggaggggtcctgaccacccgtacgggtgtgtaaggaagcgctccgcttcccgcccagtttaaaggggtccatgcagacagagcctgccggggcggcagcaaagctcgttctccgcgccgcaccttgacgtccagcacaaaagaggcctggcacaggcctcccgcccggagcagctgggtctgcgcgtccgagacctgagagcaggcgttcgcgcggtcggttccgccgtgggccaggacttacctttcgtcggttctccgccgctggcgtcgctgcttgctcacgggtcccacagccacaccacagacagcagtacccacaccgggagagagcgccccacaccctcccctacccgcgccaacctccacccggcgccttgcgttcaaattagccgggcgggccggaccgtgcttcctattggtcagcgtccgtatcgctgattggctgtttcctaagtaacaaagtgttgcgagagccgttcacagtgggcttgctcacttcctcttcctgtcggctgcagtttcccaggcggtgtctccggggttgggcacacgagagtagcgggcagaagccaacgcagggttgggatacgtggggccacagccagtctctgtggtccccgggtctaggcttagcaccagttacagcaaccagacatccaacaggtgtttaaacctgttttttctgtaggctaaattcacatccgtttgtcaagaggggattgtcaacctctgtccagcgtctctttccgctgcaggaccatcccaagatgaacttaaaggacagccttgatgtggcaaagccggcggacgccaagaatggcaattccatccgcttggctttgacagtgtcagaagcatgatgcctgacgattgcgcatgagggtcggccccttgcggcagcggtggggtgcactgcctccatagtacaccgctgcccgctgcttggattctggtgggcccacctcatgctgatttccaacacctgaggttgtgggagttgaagagtttccagttgtggctcagtcactaactagtgctgagactgcgaggcacttcagctctctgagtgtcagtttcctcatctataaaatggggccgatatcctgcccttcctactcacctaggagagcgtaggtatgaaagccttccaacgtccccagcatatgtaagggataacctttatacatttaattagaaccaaataggtgaaggctgcaaagagccaggtgctcattacttttaggaaatcttcagtacatctgttcccacactgggactatgagcaggtttgcggcatgtaagagaagggtgaggcaaaactccctcatcagacttgccatcaggataagggttactatttaatacctagttgacttggcccaaactcattcacctccctggaccccaactgacccctatacaatagaatagcattgctggtttggtgaggttaaaaccagaaaattatgtggaggtgctggtcattgtaaaactacaagaaatttggagtactcttgccatctccacaactcatgataaataaaaacaaaaaatgaaggatggcttacagcataagggtctcttcctcccttactgggatgtgtattttaacagaggttttggctccccaagagccatcaggggagcctcttgtgtcctataagccaggtcttgccctggtcctcttctggtccacacaattaactggaggttaggtgagccaggacaaggcaaggggcagagtccagccctgctgcaggcaggggacaggggacacttacttgctggataatcttgggtaagtcaccaagtctctcagagcctcagtttttggagttataaaacagggaatgaaagaatacttagcttgttacaaagattagaaaaaaagtaggtaaagccccttgctgacattcaataaaatggtaatgggtgttctcatattcatttatttaacaactacttactaatatgagacaggtgggctcagagaataggctgctcagtaatcaacaccctcctcctagcctcgtggagcttgcagcctatgggagaaattagacaattaagtaggaacaatgatgtgagacatagactataatgagaacatgcagggggaagcagggctggggagtggcatgctagctgagggctgtagggagattgggagcttgcctggcaggtgaggctgttccttggatctcagaagacaagggaagacaatctcacaggtgagagggtcaaccttggcgaatagtgctgagaggtcttggtagggcctgaccaggcccaccttagtgaacacaaatggaaattttccgggccctacactgcagatgctgataagggatgagattggtttggaattagcccaacaagaatttcaaggcctagaaccctaacctgaggactgggtgcaaaatttttttcttgtgtggaggcagaaggtgattctaggctgatgtgattggggtgtgaaaggcagcaggctctgtcttcttaggaagtgtgtggacatctcactacctgtgacttctgagaccaccgaccccaggtgctcaaaggaagcagaggaaaggcacatcctcccatcctcccacctgtacccttatcattgcagagcctttgctgtacccttatcattgcagagcctttgcaccacggtgtggcattagctacttttttttttttaattaattttttttttttttagacagagtctcgctctgtcgcccaggctggagtgcagtggtgtgatctcgactcactgcaacatctacctcccaggttcaagcgattctcctgttctcctgcctcagcctcctgagtagctgggactacaggcgtgtgccaccacgcccggctaattttttgtatttttagtagaggcggggtttcactgtgttagccaggatggtctcaatctcctgacctcctgatctgcccgcttcggcctcccaaagtgccgggattacaggcgtgagccactgcacctggcccgttttggtttgttttgttttgaaacggagtctcgccctttcatccaagctggagtgcagtggcgcgatttcagctcactgcaacctccgcctcctgagttcaagcgattctcctgcctcagcctcccaaataggtgagactacaggtacagaccaccatgccctgctaatttttgtagttttagcagagacggggtttcaccatattggccagggtggtcttgaactcctgacctcgtgatctgcccgcctcagcctcccaaagtgctgggattacagacatgagccaccgcgcctggtctactttggatataggccagttttagaaggtccttgaatcaagtatccacttggtttaacaagaggtcatgggtggcctttttttttttttttttgagacagggtcttgctctgtcacccaggctagagtgcagtggtatgatctcagctcactgcaatctccacctcctggactcaagtgattctcccacttgagcttcccaagtagctgggaccataggtgcacaccaccattcccggctaatttttttttttttttgaaagatgggggtttcaccatgttgcccaggctggtcttaaactcctgagtgcaagccatatgcccacctctgcctcccaaagtgctgggattacagacatgagccactatgcctggcctagggtgcccttgacaggagcagcttcagaggagtgacaacagccagatgacagtgggatatgaggactttgtaacaacttttaaggtaatttagctatcaaggggagcagagaaatgtagtagctgtaagaggggtgtagggtcaagggaggatttttttttttttttttttttgagacagagtttcgctcttgttgcctaggctggagtgcaatggcatgatctcggcttgctgcaacctctgcctcccgggttcaagcgattctcctgcctcagcctcctgagtagctgggattacaggcatgcaccatcctgcccggctaattttgtatttttagtagagacggggttttctccatgttggtcaggctggtcttgaacttctgacctcaggtgatccacccaccttggcctcccagagtgctgggattacaggtgtgagccactgcgcccggcctcaagggaggagttttaaggatagtagagttttaaatgatgatgggaaggagccaatatacaatgagcagctgggctgagtgtggtggttcatggctataattccagcactttgggaggccaaggcaggaggcttgcttgaggccaggagacagagaccagcctaggcaatatagtgagacccctatctctaaaaaagaaattaaaaaaaagaagaaaaattagcctagtgtggtggcacatgccctgcagtcccagctacttgggaggctgaggcaggaggatcatctgagcccaggaattggagggttcagtaagctataatcatgccactgcactccagcctgggcaacagaacaataccatgtctctctctctctctctctctctctctctctctctctctctatatatatatatatatatatatatatgtatatatgtatatatacgtatatatatgtatatatgtatatatacgtatatatgtatatatgtatatatacgtatatatatgtatatatgtatatatgtgtgtgtgtatatatatatcaagaggtgtggttatcaattaagtgaagtcctgaaaaaggctggagacttttgccaatctttttcaaccatcccaattcatctggctgggacttaggggtttcataggactttcagttttaaactgggacagtcctggacaaacaaggacaagctggtcacgccggtgggagggcataggatgcagacagagcatcttccatgaaagcaagaaaggtgaagaggaagggcgcaggttcagggaagtttgtgattttatggtggaaagttgatggggtgaggctgtctcttgtgacttctggcttctctgtggggtaggacatgtgatcacccattgggtaggcaccttttacactctatctcctgcccttgctgctgggcctgcagatctatctatctgcaggtactcaatagatattggctaaaagaatcagtgaatgaatgagactggggtaggtctcacaggttgagtcctctgtagagagaccctgggacagagatcagggtgcaggaagtttattggagcgtgctcttggaattaacacctgtgttttgttttgtgccagggtcttgctctgtcgcccagactggagtgcagtggcaattgctcactgtagccttgaactcccaggcccaagtgatcctcccatctcagcctcctgaatagctgggaccacaggcacacaccatcatgcctggctagtttttgttttgttttgttttgttttgttttgttttgagacaggggtctcactatgtctcagaggctggtctcaaactcctgggctcaagcaatcctcccaccttggcctcccaaagttgagattacaggcatgagccactgcacctggccaaattaatacctgtggaagagaaggaaacaggattgggcagagggagaagttgaactgggaactctgaagcggggaagacacttcagagctgccctgagtagggggtggagggccaggcagataaaacccatgctgatcagttatgggaagcaggctgctctgagaaaggggcaggacattgaggaaggcagctcacatcagcaggggaaatcctgaaagggggctggtagctaagagccatctgctggcagcagtctctggagttcggggacaagatccttcagttctgaaggagacctgggcagtgcaccgcagcatccatcacagcagagaaaggtgaaagtttaaggagagtgagagatggtgaaacaactgctcttacggtagaatggctattatgcggctggcacagtgttacagtactgagtgagacagccctacttggaagatgctcagtccagccttggaggctttggagcctttggagagagacctgctgcgggagtgcagaaaagcttcatgaaagagcagccaatctgcctgggctttaaagaatgagcaagcatggccgggcacggtggcgcactttgggaggccgaggcgggtggattatctgaggtcaggagtttgagaccagcctggctaacctggtgaaaccccgtctctactaaaaatataaaaattagctgggcgtggtggcaggcacctgtaatcccagctactcatgaggctgaggcaggagaatcacttgatcccaggaggtggaggttgcagtgagctgagattgcgccattgcactccagcctgggtgacagagcgagactccatctcaacaacaacaacaacaacaacaacaacaaaaagaatgagcaggcattctgcaggcaacagagtaggcaagggcctagcagacacatatctggctctggtgaggcagggagaggtctgtaactatcctagcccaggcagttttcctagtccaggccagtgcttaccactgaaggagcaaaggcctgtgccttgaaggcctgggaaggagccctcaaattttactttcatcatctgggaataggcaggagccccatcccctgaagaagctgctctctgggtagtttctttctttcttttttatttttattttaaacagagtctagctgtcatccaggttggggtgcaacggcactatcatagctcactgcagcctcgaactcctggactctagtgatcctctcacctcagactcctgaggagctgagaatacaggcttgcgccaccatgccgctaatttaaataacttttttgtagagacaaggtcttgctttgccacccaggctggtctcaaattcctggctttaagtgatcctcctgcctgagtctcatgaagtgctggaattacaggcgtgagccaccacacttagctttctttctttctaaaatcccacatataatcattcccaatctgggttatttctttcttcatttcttattctttcttttctttctttttcttttcttttctttctttttcttttttttttgagacagagtttcgctcttgttgcccaggctggagtgcaatggcacgatctcggctcactgcaatctctgtctcccaggttcaaacaattctcctgcctcagcctcccaagtagctgggattacaggcaaccatcaccatgcccggctaatttttcgtatttttagtagagacggggtttcaccatgttggccaggctagtcttgaactcctgacctcaggtgatccacccttctcggcctcccaaagtgctgggattacaggtgcaagccactgtgtgccctgcctttttttttttttttttttttttttttttttttttgctctgttgcccaggctggagtacagtggcatgaacttggctcactgcaaccaccaccccactccgggttcaagcaattcctctgcctcagcctccggagtagctggaattacaggtgtgcaccaccacgcccagctaatttatgtatttttagtagagacagggtttcaccatgttggccaggcttgtctcgaactcctgacctcaagtgatccacccgccttggcctcccaaagtgctgggattacaggcgtgagccactgcacccggccgaacccagttcttctgtcttcatttcctgcgtgtccactgggtcctgctgtctccttttctagctctgccctgaaccaacccagtcaactttggcttcctctctgggtcttagtgtttctgagctgcataacgggagtggccattctgtggcattgattctcaattttggcagatggcacaaatgaatggagagcatggggtaggtagccctctggcccctttctccagcccccagctgccccctctcagtatcccttccaatcccttccagttccaaacatgtgtagacttttcacttccactttattatcacctcattagtaggattttaaggtttattacctagaagggagtgaggaactcacaccttcagttccacttttcaaatatactgtcatcatgtgtgaaaataaccttattaacagcatctaacctgctacagttttgtctggggggcatccacataaataaatgcagaaggaaccagggcatgggcaacaacacagctagctggggtagtgcggcctctggacctctggaactttcttctagcccttgggggtcctggaactattgtcagggtcagcagaactcagatgagacccagagcagctttgagcaattggccgccttctctgggtctccacctcctgcctcctcctctgatgctcagagctcctctaggaaacagctcctgggtctccccagttcccctgtctcctggatgcttgtccaggattgattctctgggcagctcccctccaagcagtaaatgaaatattggttaccaggagtgacgcgggaggcaattaacccttagacctcaccatggcagatgtgtctatagcaagctgaaatggagagccgggcacacctgcctggccttcctgcaaagtcatccaattagggcagcccccagcagtgggcccgctgccccctctggtccccataaccttagaaaccagggcagcaccagctcctagggctggtggctgcctccacacaggatggcctgccatttctcgtgtgggagagctccaggggcacctccatccttacaaccctcctggcagggacattattcattaattaatcacacatcttcctaaaggggaggcagcctggggagatttgttgcttctcctccagagtggacatgccgttctgcctgtccagctccttcccaccacccacacagccctgccccctggaatgttcttgtgccagaaaagaaccctgaccgaggaagggggagacaaatgccctgctttcagggagccccagtagaaaaaacagacacagcctctgctctcagagagctcacagttaggtaagaagacaatctctccttcaggcagcccccagtccgggggtggagactgtccctttctcagaaagtcctagtttaatagaagaagcatagtatcggccaggcgcagtggctcatgcctgtaatcccagcactttgggaggccgagatgggcagctcacttgaggccaagagttcgagaccagcctggccaacatgatgatatcttgtctctactaaaaatacaagaattagccaggcatggtggtgcatgcatgtagtcccagctacttgggaggttaaggcaggagaatcgcttgaaccctggaggtggaggttgcagtgggccgagatcgtgccactgcactccagcctgggtgacagagcaagactctatcaaaaaaaaaaaaaaaaagaaagaaagaaaaggaaaagcacagtatctacccctcagaaccactcgtggaagccggtctttgcatctaggaatccccagatccctggtctgggtggagatacacaccccaccctcaaggagctgacgatttgaagagaaaacacaatctttgtctttgaggccccctagtctgatggagaagatatgcctcttacctttaggaagcttcccaacctgatgatggagacatagtctttgccctcaggtgtcccaagtctgaggaaaaaaatagatttgcccttgaggagcccctgtttgatggggagcatttccctagaaggttcccctgcaactaggatgtggcttgagtgacaagcagcaggcaagctggcactgcaggacactcctggtgcccttcaaaggtcaaaaaagtccttggcttcagtccagccccagctgtgccacagcgttactgcatgaccgtgggcaagtcacgaatcttcttcagactgatttcttcacctacaaaatggagatgttagccccatctctcagaatgacatgaggattgtcaagttaccagaaagaaaagaaaccaggccagccagccagtcagcctgcacgcactacagaaaagattaacatggcttttcttgtaacagaggtcatagatcagtcccagtggcctctgggaaaggtggggaggccctcaggtgtggtggctggataattccaggcccaaatggccattagagaacccggggctgtgggcagcactggggggccagaggagtgccttctaatctaatcactcttcccaccaagactctcattctagccagacctgccaggggttttattgggtttgtggggacccgcagatttcaatctccagaccccacagggaaggaacaagcattaagctaattttattaaatggccacagctggcagtgggggaagtagggaagagaagggaggataaagaaagtcattcaagtctgccagccatgacaagggtctatacatgaggcctggccaggagggaggccacccctccttcctgtctctccagctgagctagactggggaggggaagccagatgggacctttcctcaatgtagagccttgggattctccaagaggctcactccatggctgccgcccagggcagatgcttgtaaatacatcaggcgtctgcagggttggggtggaagtggaagggctgggctcaggctgccccggtgccatcctcagatctgctttggagatcccaactctgaaatatggtgtaccaggtaagagcattatctttggttcaaatactggcatttgcctgtttttagctctgtgatcttggcaagttgcttaacctctctgagcctcagtttcctcacctaaaatggataaaataacagcataattttaaagggcatgagataatttcctgtagatctactgcccacccctgcacacatatccatgagataatatttataaagttcttacgtagtacctgacatataatgggtgctctctcaatattagctattgttatctagaaatgccctgtgtgacatggcctccagttataggaagtgaggatggcagtggtggagtaaggggacttggtatgtcttggattttctttctttcttttttcctttttttgagatggagtcttgctctgttgcctaggctggagtgcaatggcgtgatctcagctcactgcagcctccacctccaggattccagttattctcctgcctcagcctcccaagtagctgggattacaggtgcctgccaccacgcctaactaatttttgtatttttagtagagacagggtttcaccatgttggctaggctggtctcaaactcctgaccttgggtgatcctcccacctcggcctcccaaagtgctgggattacaagtgtgagccaccgtgcgtggccatgtcttggattttcaagtgcaatcacagaacttagaaactatgtaagcaagatatttaacctccctgcaagaataaaatctaggtccaaccttccagggctgtttggaaaacttgagatgacatacttggaagcattttgcaagttatagataaataataaaagctatgtttactgagcacataacaataaacctcacgaatcctcaatcaagtgaggtaggtctcctacgtttattgatgaggaaaccgaggcacagaggtcaagtgcgtagacctaggttaaccagcctttagtccaaaggatgttcctttctatggctgtcactaatcctaaattgcgttgaaagaagtgacttgcccaggatcatacacggtggcccagagccggacctaggtctccctgtttaaagatcacctgtgcctgtggaatgctgatgccactttcagcgaggctcccgcctgtaatcccagcactttgggaggctgaggcaggcggatcatgaggtcaggagattgagaccagcctggccaacatggtgaaaccccatctctactaaaaatacaaaaattagctgggcgtggtggtgtgcgcctgtattcccagctactcgggaggctgaggcaggagaatcgcttgaacccgggaggcggaggttgcagggagccgagatcttgccattgcactccagcctggcaacagagcgagactccgtctaaaaaaaaaaaaaaaaaaaaaaggaatgtgtccaccatggaagatgatgaagtaactgggctgcttcccatcccagctgcccaggcccacttgggttgtggtgggctttaggccctttggcaacttcttcttggagtagctctggctctggcacctggtttcccctagaaacttccaccagaccccttcctaatctggaggagggcacggtccaccgtcgcctcccgcagccctccccagggcacagactgaaacccctgcggggtgaaaatgtttttattataactttggtcagacggggcacagccgggcgggggctctgagggtgctgggaagctatccagcccccaactcccccctcccccgggcgcgccaccccggagggagcggagggcagctcatctcagagcgcaggaagcaaacccgccgccgcgacctctccccaggctggggtgggctggcaggcggaggtgggcagtaaacagtcctattgtacaaatatatagcgcgggctgggcgggggcggtcaaccccggttccctggcacggggacagggcgcgctgggcccggctctgcagcgagccggtgggagggcctagctgtggcccaggcggtgttgagcacgggccgggggcgtcatagccggggagggccgggcagcgagcgggtgggcgaggggcgagtcatcgtctgccccgcccggaggggaccccggcgggtgagggacgtgggtggagggagacgtggggagctcagtcggagtagatgatgaagccagagaacgtgctgtatttgttgctgttgccgccgtgtgctttgcctccatccagcttgatgaagacctcgtcgccggcgtccaggtgcaggatcacgctgttgctggcgtagtcgtagttctggtccgcgtcctgggcaatagcactggcccgcacctgcgggtgggggacacgggagggagggcgagaggagagagaggatgagaagggagggaggtgaggcagtcccgtgggggaggatcagcagacccagaaacctggcctccagcctcgcctcatccctgccacgctccccctcccccgcccccttccaatcatacaggacttgtttcaggaaaggggcagagaggatccctggatttctagggcaggtctgatctgggcctgaattgggagtcaaggcagagtcttcctccttaactcttatagggctttccctccagctggctgagaacctcaatacctccaggaagcctggaagcctgtccttgcaaagaggaattctctggacctccagggaatggagggccttccctactctcatcattccttcctctctgctttcataatgatgccatcgtttcagccacacccgctggatcttatgtcagtggatggacacaagggcacaccttggccccacaggtcaggcagctggaccaatgccaggctgccagtcagcaaccaccctggaaccagggccaggtctttggtctgaagtgcattccagagtctctcctgctgcagcagtgagacagaaggcctggtaatgctttcccctcccagagtttagaaggggcctgggtgccagcctccatggagctgtagctatgtacctgtcactacccacccaaagaggattgtagctcctcctgtctcacctcagggtggtagaaaggaactgggtgggaagaagggaatccaggccttacttccctctgggattctcagtctgatgtgacatccttgctggtccctgccttgatgggggatggggagggacaggcaggataatgggtcaagggagcaccagcatttgggcttggagcctgccgtcacttttgggggctctgactataatcataagagattgtgtggtggctgcatacggtggctcatgcctgtgatcccagcactttgggaggcccaggcaggtggatcatttgaggtcaggagttcgagaacagcctggccaatatggtgagacccccatctctactaaaaatacaaaaattagctaggcatagtggcacgcctgtaatcccagctcctggggaggctgaggcaggagaatcacttgaacctgggaaatggaggctgcagtgagccgagatcatgccactgcgctccagcctgggcgacatagtgagactcagtctcaaaaaaaaaaaaaggccaggcgcggtggctcacgcctgtaatcccagcactttgggaggccgaggcgggtggatcatgaggtcaggagatcgagaccatcctggctaacaaggtgaaaccccgtctctactaaaaatacaaaaaattagccgggcgcggtggcgggcgcctgtagtcccagctactggggaggctgaggcaggagaatggcgtgaacccgggaagcggagcttgcagtgagccgagattgcgccactgcagtccgcagtccggcctgggcgacagagcgagactccgtctcaaaaaaaaaaaaaaaaaaagagagagagagagagagagagagattgtgtggtggtgaacgaatgatctacagacattcagctaacaggtatggaaacataagtcctgagtttgaggatcggggcctctccagggtatcctgggtagagacatggaagagaagcgccctctccaggactgtggcttgtggtgtggggaggctgcactgagtggagttctctcagccaggtttctccacggcccctctctatcctgtcccttcactgaaggcagcttaccatcccaactcccagggctgaagtctgggtagaaccaagccaaattaggggaggggcccatcctctctcctgggctggaggcagcactgcaggtcagctgtgccagagctgctgactcagccgcgatgctgcaatgaagaggacccgacatatttgcatgagggcctccctttaaagcccttctccagccccttcttttccctcaacctcttcttcccaacctgagaagaaactctttgtgtgcttagctgggaaaactggtctagttaaaggtgggagggaataaatgaagggggagatgctgtctgccaaggagctcagtttctctgtctagaaaatggatgagaagactttgcctcaccactgccacctctgtaaaagtcttttgatgataaagaaaaaaaaacattagatcttgatggggctttgagttattagggaagagctgaaagcaaacagccaacttctgtattgttccctgagccctaatcctggtaatatttattattacacatgcatttcattatctttgctaataaattactactaataacaattatttttattgcccagattaatttagccttaactcattaaaacagtgtgctccttaatagccaaatccattggaacagagtcatctgtcatcaggaatctcctggtgatgtgactgcatcagaactgttatgcttatgtttattatttattcatcaccatgattgttgccgtaattatcctaattatccatggaggcagagagaatttatgcccttccatccttagatggtgggggatccaagaatggaacccaggggtcccaattctctgcctgactggagacagttgaggcctgcagctcctcctggggtccaaggggaagtgtggggaaatgaggttgccaaggaagcaggaaagcaggtttgggccttgttatgagggagcgctgtataatcagctcctcaagggctgccaggaggggaaactgaggcaatggtctgaccaagggaactgggtgagagggcatccaggaaacacgttcctgccctcagatcaatgctggggtcttgggtgtacagatgtggctcccataggggagccagcctggcccatgggggacacttgcattttcatacatacattaactgcattcccactgtgccaggcactgtgctctgtgttgtgaaaggtattaggggccagaaaggatagccagggggccatctgccaccaccaggggagaggctgatctccttaggtcttttttcttttttgagacagagtcttgctctgtcacccaggatggagtgcagtggtgcgatcttggctcactgcaacttccacttcccaggttcaagtgattctcctacctcagcctcccgagtaactggaattacaggcacccaccaccacacccggctatgtttttttgtatttttagtagagacagggtttcaccatgttagacaggctggtctcgaactcctgacctctggtgatccgcccgcctcagcctcccaaagtgctgggattacaggcgtgagccactgtgcacagccttcttaggtctttataccaccaccttcaatttatatatgccagcacctctcgccacactcagattctgttgtcaaacccctggcccattggtgatactcacctccccacagcctcctaccctggataagcagcaccctgaccacaggccctggcacatcctcacaaagccccctgcccagtttattaattttgtgtcctctccaacccacctgaactgtggatcttggaggcagctgcaggcaactcaccacacccagggccccactgccaacccagagtcctttccccaggctccttgcatcctaatggccaggacttggtgccatcaggggtgctgatgcaaggctacccctaaggactggggccagtgggcctcagataaggacagagggagcctcagtgccaggcatgaaggtggtgctccccatcccgaacttgcccggagaggaggcagagcccagattcagctctgcctccctaaagaaattctggaagcctctctacaggcaggaagccaggaaggaaaagcgcagtgctcagggtggcccctggttctgaagtcacaagagatacaagcttctctcttttgttcccatacattgtctggtcctgccatttttttctctgcttatttaaatgtccttgtccacctctgagctggctttcccctacacttgaccttttatattctcccttgtggtatctcctcactttgcagaccaaggttcaccatcttctccccctgcatcaggttggtctgcaccagggtaggccctactgaagcactccctcccagccaacacatttggggaccaaagtcatcagctgggctcccagcccacctttaacacagtattcgctggggcgtgtggttgtatgttatgaatgttccccctgcataggccatgaggtcttggagggcaagtggactgaactcctacaaagcctcaaatctggctcctagtaggggctcaaaactaacaagtgggatggctagtgagatcaaatgagtctcttgggcaatttggaagaagtcataaaggacatgggagagggggctacgggccccactatttctcctggttttcttttcttttcgtttttatcttttcttttcttttcttttttttttgagacagagtctcactctgttgcccaggctagagtacagtggcgagatctcacctcattgcaacctctgcctcctgggttcaagttattctcttgcctcagcctcctgactaactgggattacaggtatgcaccatcacgcccagctaatgtttgtatttttttttttttttgagacggagtctcgctctgtcacccaggctgtagtgcagtggcgcgatctcagctcactgcaagctccgcctcccgggttcacgccattctcccgccttagcctcccaagtagctgggactacaggtgcctgccaccacgcccagctaattttttgtatttttagtagagatggggtttcaccgtgttagccaggatggtcttgatctcctgacctcatgatccacttgcctcggcctcccaaagtgctgggattacaggcgtgagccaccgtgcctggcctaatgtttgtatttttaatagagatggtgtttcgctgtgttggccaggatgatctcaaacccctgacctcagttgatccatctgcctcagcctcccaaagtgctgggattacagacgtgagccaccaggcccagcctctcctgtttttcttttgagggggctggtctgaataactattaaagtgctgggcctttgaaacccctagttaaagccacctccttttttcctactagcctgtggtcccatctccagtgagcaccccttcatcagactctgtcaacaccctgcccctgctggagggaaaaggagcttttgagatggttttacctcccagtgactgaagcaagttccccattctaagcacatagcatctccggggcctcttgttgcctcatctctggggacctgctgggacttcctgaggtggtgcagggtctagggccaacctgtggcccaatgactgcctccctatccaggcaagctgccaatcccctgaaacctcagctctgtgtcagcccaaacttctttgggaaaggaagacattccattgatgaaggtgacattgctgcatcccttattggtgattaatagggggaatcatggggctgtctgcagaatgagcctttgctggatactggggcctcccatttggtcaggaaccaaggacaaagaggagagacacggggatgtctgatagacacacgtgggaaagagagacatacaaggaatagagaagagtggggttagatccggggaggagaggccagaaacccagggagagatggaaaaggcagacacaggagagagatggacaagaaacagcaaaatagaagaaagaggcaggggagaggcagaaaccagagaaaaggtgttggcggggcagcagccaggcagaggaaagagaagaagggctgacttataagcacctggcaggctatctgctcactttccctgcctgcccctgtctctgcccctaagacttgcagacccgcaggctggcagagcctcagggcagtgctgctgtgggaagggttccaacaaggtcttgtatcttaatcgtgagagattccttctcaacttccactagctcagctttagttctgaccagtggtccccttcttcgaagagaatgctcagcctgaccacacccccaggtcacaggccaccacgagtgagagcactgggaagggaggtggtatcaagagagctggctaaaattgtcaccccagggcggggctgggtggaggctggtcctggggtcggccattccaaggagagctacacgcacatgcgagtcccggtaccagagtccccgacacactcagtgctttccagctgcagcgtctgagatggggacggagaatggagaggaccccacacactccagagtcaggaggggctggagctgggagaccaagaggagggggagtttccatctcttccaccaccccccaccccccaccccctccccgcctcaggaggaaaaactcccccgccccccagactgccttctttttggggaagctctgctacagtgggaaacagctccccaactcccggattttgcaaagggtgtcagattcgcccaatggtcccttctccagggcaggggaggcactgcagccagggctgtaagcaccgggctccctttgcctttgtgccccaaacatttcctgcagccagccttctccgctcgcgcccatggccacgcgcctaggcgcccgcgggcgcggatgctgcttctccctgttccatacgccagagcccatccttgccctccccttatcgcccactgctgtcggcccgaatccacttcccaaggggcaagcccccaagggcaagtccgtgcacctgggagccctgcgctctgactagttgggttcatttcccgcatttccagtagcgttccagacggtgcccagcagcgtctgtcttggagcgggaacccaggaactgaggatcggcgatgtccgctggctccgaccatccccacacgtgatgaccaagcggggccgctgtggggtgggatctccacctgcgtccgcctggcgcccccgccaactccgatcaggtacccatttgccccgggctccctgggtgccctgggcccagcccagccccatgcccccgcctggcccacctggccattcttgcagaggtctgcccacatactggtgccgtcgccgccgcgcatgaggacatggtaggtgaaaaagtaggtgccgggaatgttgcacgtaaacttgccgctggccgcgtcgtagttgttgcctaggttggtgaccacgtcgtcaaacttgagtacctcgtaaccctcgtgggggttcttgaggccggcgtagaaggccacgcgcggcaccgtggtgtaggtggcagtgctgatggcgccgctgccccccgcgcccggcagccccggagggcccggcttgcctggctcacccttctcccccggcggccccacagggccgggaggacctgggtccccgggaggccccggagggccgggcttgccggtgcggcccggcttcccctgggggccctgcaccagcgtggaaggcgggggcgcgccgctctgctcgctcagggcgtcgccgccgtcggtccgcgcgccggcgccggggccccgcgcggggtaggggtcgcacaccatgcggcaggtgcccagcatctcatagtggccttccgggccgcccgagctcaccagcacggggatgagcaccaccagcaccagcagcatcaccacacccgcggcggccgctagcagcgtctttcggcccgcgcggagcctggggagcgccgggccgcccggccgcgccgtcggggcaatggtgccggcgggcagggggcgcgggctaggcgcccgcgctcaaggacggtccggcggggctgcgggcatggggccgggcccggggcgccgcgctgcgctggctgcgctgcggagcccagccgccggctcctgcctcgcgcctccctcctgctgcgctgccggactgagcgccgcggccgccgcctcccgcctcccgcctcccgcctgcagcctcccgcctgactcctcccgcctccttgagccgggccaccgccccctcggccgggccccgccccgccagctccgcgcggctctgggctctctaggggtggggctgcgggcggggccggcgcctaattgggccgcgggcgcctcgaggtgggcggggcataagggggcggggccgcggagaccccgggcgggagcagggagaggaaagaagagactgagtacgcggagaccgagattcggaaatggggtgggggccggggtccgagagacccgagaggcgctccaagggaaggggagagtagggaccaaaatgcgaaagggagagagggccacagggagagctagagagctccgaggggatcgggagaggagaggcttcgagggtcggtcaccaggaaaacagagggactggggtcgcgacgggccaagacccgcagggggcggaagcgaggggatagcgcccaggtctgcaggggacaaagagcgattgaggggaggacggagcggggagctggaaggtaggatgagaaagggggttatgaagcgaagaagaggatacggaggggaccatttggcactcaggcctcgcagaccacccgtctgggagatccagatatcggatgaatgcctgtccgggggcccagcggagccagacggcagccgcctcctcctttctggatctgactgttccgggacccgtctcccccgaggtggggcaggagcttccaacccctcctcgcctctgccccttcctcaccgaactgtggccaggctgctttttcctgggcccttttcttccatctccctctgctcaatccctttacttctgcctctagaccagggagaaaaggggatcctaaaaaggtgggcacccccacgttatttctccatgctgacagatgcaaatacgtccctgaggggtaacccccttttccagcctccaggatgaggggtggatctcatccagcccctcagctcctcctccctcactccccagcctcctccgccgccccctaactcttctccccatcaggctgtgggaggctctcctcttcctcaagtgcagcaaagtgtttaggttgcataaaccgaaacgtgtctgcttccatcaaaatatttgtcacattatctgaggcccaggtcgggctgctccaccgctcctccttcgccctcctttatccggcccaccggggaggattcagccattcggaggcgactggccggctgctaaagaatgacatcccagcctctcctctcccgagagctaccccccgccggctcacactctccctgttgacccttcaccatgggcaaaatgattccctggccttccctacccaaggttgaggtcgctcacctcatccagggctgggagtagaaggacacagggacatccaacgagggggctgtgaaagaggaccctccaagcactaatggctgaggccaggttggagtgaccccaccaccaccaaggagggagctaaaaaattttcaataagtagcatttattcagggtttactctgtgctaggccctgtgttgaatgttttacatacatgatcacccttgatcttcacatcagtccaaagaagtaaaatccaagattattttaattttacagatggagaactgaggctctgggaagttaagagatttgcttaaagtcacacaactaataagtgggagagccgggactcaaactcgtagcctggctccaggctcttccaacctcagcgcgatagagtctctaggtaccgtttactgcccaaagcccaggggtagggggctcagggcagccagacctccctaggctcaggaagagtagtcttcagcgctcggctgtcaggcaatccggtccccggttccccacggcggtctcctcggtgtgccccaccaagagcgacagggctggtgacccgaggggcgcgtgcgcggtcgtcagcctgggatttgcacggacccccttctccctagtacgctcgctcgggggcccctcctctgctacgccgctggggctcgcccgccacccacagccctcgcagagccctccgggcacaccgcggctggccgcccggggccaaggatggggcgggagcgcccacccacccccgcgccggccggggcatccaagaggcgcgctcgcagccacacggcgccccgcctcccgctccgaaaaagctcctgctcccctggcgcggtgtggcgtctccgtcagcccagccggattctccccgcttcgctggagtggaaaataacggcttcaaactttgcagagaggagctggtgccagcactttaattaacagccatcttggcctgtgagctggggccaccggcttggcgcctcccctgggctcgccaagccccgccctggctccgcccaggcccccaaagaagcaccccttaaccacctacccgaccctccacccccatcccctgctctcagcgcccctctttccgggagatgagggcttggctgattggggagagagtgctgccttgaggggcatctcccagcttaacacctgaagacagtcacaacccccccatccgccatactgccccccaacattgtttaaagctggactgttgaagattctgaaattaaagacctgagtgccagccgggcgcggtggctcacgtctgtaatcccagcactctgggaggttgaggcccgaggatcgcttgagctcaggagttccgaacaagcctgggcagcatagggagatcctggcgttgtggcttttacctgtagtcccagctactcaggaggctgaggcgggaggatcgcttgagcctgggaggtcgaggctgcaataagctgagattgcgccactgcactccagcctgggcgacagagcaagaccctgtctcattaagaacaaaaactaaaacggcttgcgtgccaatcctacccggtgattttaggtaaatagcctacccagcagcccctggcatcctttggtaaaagggtggttgtgaggattaaatgatgtattacgtatgtaaagtcctgggctcagtatctgacccttattatacacctcgtaaatggtagctaatataactatttcacctcaaggccaagaaagccctctcaggagacccccgggccttgggtctacttggtcctgccagcttcctacccattgctgtccttgacactaggagagggggacaatggacctaggctcccaggttcagagatggaactggatgagtgagggaagaaccctgaagttccggcttccaggcctcttcttcaaccacctgctaagaacaaggactcaggttttcttttttttctttctttcttttttttttttttgagactgagtttcgcccttgttgcccaggctggagtgcaaccgtgcgatctcggctcaccccaactccgcctcccaggttccagccattcttctgcctcagcctcccgaagagctgagattacaggcacgtgccaccatgcccagctaatttttgtatttttagtacagacatggtttcaccatgttggccaggctggtctcaaactcctgagctcaggtgatctgcctgcctgggcttcctgctgggattacaggcttgagccagcttgcccagccggggccaggactcaggttttcagaagcgaaaagggagggagggtttcaaggtaaggagggcggctgcactctctgtagctgggatgctgtcagtggggggctgaaggtctaactttgcttcccgaacttctatgagtgtgaggggtcactcccacagcccccatctggaatgaccctaccataggaactcctacagtgagggggtggtgccgacagccccagtcattccaggcattgaggtagattgtggaaggtacagggaagagcgtaggtaaggctttttacccaggcatgactggcactgactttaggaactgagtgactgttctgtggtattttggggttctttgaatgaatgtgagtgggtgtgaatgtgtaagaggctgttgatgttgctgtgtgtctgggtttgggagtgaggaaggggggtgctgtgccctgactcatcagctgctggatctgcattgagttgtttttacatttactgaaaacagctagctaggtcctgcctgggtgaaaacacctagctaggtggtgatggtgtgtcccaagatgagtaggaccggaaggctgagcggtgcccctgaggagttcactgtttggtgggggacacgtgcagaaagataggatactttgccacaataattaccatagctaacagtttttgagcacttacaaagtgcaagatcctgttctttttttttttcttagatggattctctctctgtcgcccaggctggagtgccgtggtgcgatctcggctgaccgcaagctctgcctcctgggttcacgccattctcctgcctcggcctccggagtagctgggactacaggtgcctgccactatgcctggctaagttttttgtatttttagtggaaacagggtttcactatgttagccaggatggtctcgatctcctgaccttgtgatccacccccaataggcctcccaaagtgctaggattacaggcatgagccaccgcgcctggccaagatcctgttcttaagcacttttatggattatctcatttacacttaacctattatcatggatttaaaactattacatggcttatgtcacgtactagtattaacctcatgaggtaggtactatcattttccccattttatggctgaggaatctaaggcttgggtagaaatttgtaggaggtgttacgaagtccaaatgacgcatagatgaagaatgtcctgcccaggctggacacagtggctcactcctacaatcctagcactttgggatgccaaaaggcgggaggatggcttgagtccaggagtttgagaccagcctgggcaacatagtgagaaccctatctctacaaaaaataaaaaattagtcgggcctgtagtctctgcgacttgggaggctgaggtgggaggatcgcttgagttcaggagattgagactgcagtgagccatgtttgtgccactgtacttcagcctgggcaacagagcgagaccctgtctcaaaaataaaaaattaaaaataatcccctgctgggtgcagtggctcacgcctatagtcccagcactttgggaggctgaggagggtggatcacttgaggccaggagttcgagaccagcctggccaacatgatgaaaccccatctctgctaaaaatacaaaaattagctgggtgtggtgacatgcacctgtagtcccagctacttgggaggctgaggcaggagaatcacttgaacccaggaggcggaggttgcagtgagctgacatcgtgccactgcacttcagcctgggtgatagagcgagactccatttcaataataataataataataatgccctgcccagaggagtccaagaagactttacagaggaggtgtcatttttttccatttatccatccatccattcatccatcctccatccattctataaaccatattagctgactgcccaccacatctcttgttatcacgggacacaaagatgagcaaaaaagacttctgtttggctggtaaggttggggagaaaaagagaaaaggctcctgacctcatgtagtttaccatgtattgctgaaacctggacaattaaacaagcaactgctatctagcctgacaaggtcacttagaatgtggagtactttgggcacactcggcagtgtcacttaaattcatctgggggcagggaataataggaaactttctaaaggagatgatatttaaggtaagccctgaaaggagtcatcaaggtgaagaatatggccactggaggtggaggagggagagaaagaaaaggattatgggtagagagaacagcatgtgctaaggaccatgcttgcagagcctcgtgggctgtgacaaggagtttataatttgtcctaagggtaattagagattactggagggcctgggcatggtggttcatgcctataatcaccagcgctttgggaggccgtgatgggtggatcacctgaggtcaggagttcgagactagcctggccaacatggtgaaaccccgtctctactaaaaataaaaaaaaattaaccgggtgtggtggtgggcgcctataatcctagctacttgggaggctgaggcaggagaatcgcttgaactcaggaggcggaggttggattgagccaagatggcaccactgcactccagcctggacaacagagcgagactgtctccacaaaaaaaaaaaaaaaaaaaaaaaaaaaattactggagggtgttaagtgaatgaataatataatcagatttttcagattagaatgagcactctggctactgtgaggacaaaggattaaaatagagtaagagtgctggtagggagacttagtaccaggcagttgcagtggttcaggtgacagctaatgatggcctgacttgggaaggtaggaggtggaattggctgacttattgacagattagttggggatggggatggagtagggggcaggagacttccaggcttctggaaggatcttgagatgtttattgaatgaaggatggatggatgctattgctgttgcctgggtactgatatgtgccaggtgcttcacatactctatttcatttacccctcaccaaaagtctaaggaatatgcatgatctccatattggagataaggatgctgagacttagagaggttcagtgactggcccaggatcatacagctggtaagagggagagcaggattggaactcaggtctgtttgaccccaggtgggggctctttacactcccactctacctagcccagcaggcacacacctggtggggaagacaaggaaaggtactttagggtcaagacccaggagtataaaaggcgtatttttgttttctggttgaagccaccagtctacagccctggcttgggcaggatgaggagctgggcaccaggaggcagagaccatctctcaaggcccagtgaggataccagtttgccatgtgtgtttggggatgtctcatcacgcccatccatttctttctctgggctgggtaattttctggctctgagaggctgtatttcttacattaaagacagcccaacactggcatccatttatatatttttttagatggagtcttgctctgtcgccaggctggagcacagtggcacaatcttggctcactgcaacctctgcctcctgggttcaagcgattcccctgcctcagtctcccaagtagctgggactacaggtgcgggccaccatgcctggctaattttttgtattttagtaaagatggggtttcaccatgttggccaggatggtctcggtctcctgaccttgtgatccacccgccttggcctcccaaagtgctgggattacaggcatgagccaccatgcccagcccattttaaaccccaagatgacttttgaattcagacatttccagatccttcttgtgaaaaccctccataatttcagcatccttttggagagggggactttggccagaaagtatgggagaatggaagttgagttgcaatttggggtgggggttagggtatgcctcagtgggctgaactaggctgggtctcagaactcctgagtccggatcaggcctcagaggttgatgaggggagtttgttcaggggcctctcttcccagctccatcttctgaggaggaaagagtgggattcagctggcagagcccaagtacccaggtcacaggcagattttcttatgcctctctcaccagagaaccctgagccttgtgtctggggttccagggacctgcccggtcctgggggtcctccctacccattctgatcggcagctgcctgctgcccattccaaattcagttccagggacacagctccgaaaaggccccacgggagggagggagagacctaaggggaggggctatctcccctcagcccagcctgcggctcccagctgcatgtataagtgatgaggctccacagccccaacaggaaccaatataatggcaggtgcgccgggtcagctggagagacagatagcaggacgcgggagtgacaggcggtgcaattatgctgagcctcctgcaaaggcggcagagaaggccccgcctggccagcatggcccgcagcctccccactccctcccacaggccttccagccccaccagcccccagccccactccaaggtaagatgcggggaggcagaggatccagggctagttgggagcagctggtcttcctgatttctgggtctgaggaggggggtatcagggagaaagcctcctactccccagaaagcttcctctttggaagccctgtcccttctagggaaaatgtcccttcttcttcccacctcaggagatcataggacttaaggtctggagaggtcttagagaccccacctttgacagacagggaaactgagggcctgagagggaaatagcttgcctaaggtcatagagccaatctgaggcggagccaaacgggaatcccaggggctctttccaggatggatgagagaccccagggtgaggggaggagggccaattgctggcctctgtgcttcggggagcaggggggttcctcacagagcctctgagggtggacatggagggtgaggctcagggaggtcttacagctgggtgtgtggttggaactatggctgcagcagtatccttgcagggcaccaatcagccagggttgggggtggcccagcccccttccatgttcagagaggggtctttgagtacctcatctccatacatttgaggacagggtcagagagggggtctctggtgtggcagagccagaagagctgagcagtgggtgcttagtaaatgttcatcaaactgaactcctacacagggccggcttcatagatgtgccacctgttggtggcaagggccccgcacacaaaagggacctgaacttggtttaatgctctgctatcaccaccttgagattcttaatgatttttgaacaacagactcacattttcagttcccaccgggtcccacaagttatgtagctggtcctgcccctgaaacagagatgtggtttgttctttggaagggctcccctgcctcatccctgccccaacctcatcccaagatgccccaagcagaggaggacacagagctaggaaaagctgatgtttgctgagcttcttggaggtctccccgagtcagggctgaccaagcatgtgtcagggcaggagaacttggctgctctgtcctggcagccttgctcccatgcacaggcctgcaccttgcctgtctgtccatctgtatacccctatccctgaccctggccagggcggggatggagggctgctgggccacagagctcctggtcccaggggggattccctgttgtttggggagacttggcccctctgctcactcctacccctgcccccactaggacgggaggggttggtggagggggtgggaggcttaattagcagccgaagccaggcagcaggcaggagaggtggaggggggcgcagatcgggctgacttttcccactatagatctgctctctgggagaggcactagctggctggcttaggctctggcttggctattttaggaatattcttaaccctttccatgccactgccatcatcagacttctcttccagagcacagaacatcaggctgtcctctctccctgttccctcctccccagtccctgctgttcctccctggcagctgagaaggtcagagttttctcagtggtggggccagttgacttttgccaaggaaaactcgcagcccctgagcccccttctttgttccaccctgagccttctccctctccacttcctcacagctctggactcagaaaagtggcagactgagcatggcctcagctcttcttctcattttataaaattgggagggttagactcccccacccaggggaaaacagctgacctggatcccaagagtaagataggaagcgtagtcctggcttccagcctctggcagagcagcagcccctgcctgcctgactttgacgcccactaggggcgagtttccagggggtgtcccacacagcagccagagcccctcagtgtcatgagattccctttgcctgatttatctcccactctaggtccttcccagggtctcacttcttgggaaaacctaggctaggatataggcaccgcctgggcaatgcgaaggggagtcccactggggaccaggagggctcaacattgataaatctgaaattccagccaagatgggaaagagatctcggctctcactgtcaggagttcctgcatccgagatgggctagactgagctgggaggcccaggacatctgggcgctgtggtgccatccctcaggcacatgacttctgggactagaagttggagtttgccacaaagtgctattgggaaagcttgctttggaaatcgaggcatatggctgatgatgccacataaatgcccaagggcttggggtgtgcctggcactgtgctgggcactggggatagaggattgataatcaagaatcattctctgcctgagaaaggaagctctcaggggctggttctccaggtgtctgaccaccagcctgggccaagtattgacgggctcgggggagtgagtcctccctacaggtgccacgtaactctccctcctccagattgtcacaaccagcccagctccagaagtgacagggctggctgggggtaggggtgaggccagaaaaaatgctttagttcctatcgggggctacagaaggggctcttgtgatgggggtcactgagctgcaggtcttccagcttccaatctagaaagagcctgatggattgatcgtgggtccagggaaagattttgagttcaaagacgtaataccctccagggactccaggagaattttctgtgtcatgtaaaaagtaagaagaggctgagtgtggtggctcggccctgtaatcccagtcctttgggaggcagaggcaggaggattgcttgaagccaggagttgagatcacaggctgggcaacatggcaagaccttgtctctacagaaaaaaaaaaaaaacaaaaacacaagaagatccctctctttgcccctaattgagagacatgactagaaggcaggaggttggctgtcgagtggggagtgcttatcaggtaggggtggggcaggtttcccatgttatcttggaaggtatttctggctctacagttcctgatgaagacatactcgagcactttaggccaaccattggtaaaactaggagcagaactcaggagtcctggatgcctgcctctccagtctccagtgcagtcccacctctcctccccgctgctcctcgattgctagctccctccctgccagtttccaggctgggagccccagctggcggaggatgtcttgctcctcagcagctgggatttgtaaatatttataggaacatggaacagatcagtggctgacaggcccagggagcgggcagggccctgcccggagctcagcagcttcactcccccttcccacaccctggcctgatttgagggagcccaggatgacaaagagggggtgatcaaggagggtatggggccggcagcctctatatccaggaacacgagcttgaaggatgcgtttgtccatctgccctgggctccgctttcacacccagtcactcacatccttccaccctcaccacagctcacctgcgtgctcatgtggccaaggccacactgacccccaccctcactctttcaacacttcactgtcacactcacacatgtacacacatgctttccaactcccacgtccacgttgatactcactctcataggctcacacttttgcacactcaccacctcatgctcacagacccactgggggcccagatcccagccactccccataggtcttaacacaggtcctgggagggcaagtcctgtttcctatctgaggtggggtatgagtgcgtgtgtgtgtgtgtgtgtgtgtgtgtgtgtgtgtgtgtatgtgtgtgtatgcatgcttgtagggagcaggagggaacaggtcctgaagtcaggaagtgaggaagagggaggagagagggagagaggcatggaccaagggccattcagagctgatagaagcctggtgtggaagcaaggcagagacaaaggcaaggcaaagaaatagagactgacaagggtcaagccagagggggaagggggtggggaccgaggcccccccacccagatgagaagctgtcacattgctgctccggtggccatgagaccagcaccacccccagctggagcctttcccctctggatcttgtcactgtggctttgctgcttgggcagccgggagtggtgacaagcagggaagacagtccccagggcagctggccatgccactccagcctggctgccagctcacccatcactgcccatctcatcacccacaggggcccagatgaaaccaggaatcggcctggctgcccttgcctcccagtgtcacagtagagagcaggggagccactggccccctccccaaaacgtgggcagtgttaaccacaccttgcccaggtccctggaccttgaagctggacttggggagaatgggccaactctctgctcccaggcacccaggacctgctagacagggaaggaactggtgaatgagacagggtgcttgaggagggggttggggaatgaagccactatgaggaacccagtgtgttttgggcataaactttttatttcgtcgctttaccatgcacaagaatgatgaccccacatgcccctggtgctgtgttaaataatcgtccttctcgcctcgggtctgtctcacggtattagttctggggcatcaatcagccagtttgtgctctgcaatctgagaacaatcatttctataaaatcagtaaggcaaaaaaggaatcataatacaaaggagggaaagttgcactgactgctgttttcctgtttttttaatcagcagtgcagctttccgtccaggttttgatgtcctgattgattcatgctttcacgggttcattcatgtatttactcaacaaccattgctcatccgagtgccaggtcctgagctgcgtcctgggagccagtgagaaagccagacaaggttcttgcttacatagtgtttagagttgatcaaaaccaaacaaacgcacaacaaaatgtgattcccccaaggggccagagagcagtgtcagagtgcccagcctggggacccagacattgggctcttccagtggaacacttggaaatcacccagaattcttctctcgtcccaggatcaacatcttcccatccctctcctgccttggcagtttcgcttttcctaacaatcaggccatctggtaatggggggatgtacgaatgtgaaactgaatctcagcttggacactcgctggccaggtgaccttaggcaaattgcttcatctctgagtcacagtttatttacttttctgtgaaacgcagtaagtaatacccatcaccagggtaccattgactttttaagtatatacgtcaccaaagaaggtgcctggtacacagtagggcctcgaccagtgctagtacctttccctgcccctttgccagtgatatatgctgcatctctcctcacaggcaaggaaaggaagcttagggggtatggggagtgcaggaggacccagcattccatgtgccattaatctatgttttatgctgtcttcccaggcatctgattctgttctgctctatgggaagcctcttatttaaggggaagagggtgaagaggcctggctttgccacctgaaccacctgaatactccagagaaacagcccctttcttcactgtttcttctttctctggctttcaagtttataaaagcatattgtgggtctggtggttatggaatggtggtggtaacagtggtgtgatggaagtggtggtggtggtaatgatattggtggtggtgatggaggaggtggtggtggtaatgatattggtggtggtgatggagaaggtggtggtggtggtagtgatggaggtgctattggtaatgatggtattggtggtgatgatgcaggtgacggtggaggtagataatagaggtggtaattgtggtggtggtggtagagatggtggtagcgatggaggtgatggaggtagtagagctggtggtagtgatggaggtgatggaggtggctgtggtggtggtggtgatagtgatggaggtgatgttggtaatgatggtattggtggtgatgatggaggtgatggtggaggtagataatggaggtggtaattgtgatggtggtggcgatggaggtggtagtggtggtgatgataatgatggtagccatggaggtgatggtggtggtagagatggtggaggtggtgatggtgttgggagtttatctcaaaatcccatgctcagattttaagagctagaagagggctccatttcagtgaatctctgagggccagctatatgccaggcccatggtgctcacctccttttcacagcaatgccctgagtttactatctccttttgcagataaggacactgagaccaaatatcaaatgacctggtcagaggcatggagaagtttttttctgtttttttgtttgtttgtttgtttgttttttgttttgtttctgtttttgtttttgttttgagagagagagtcttactctgtcacccaggctggaatgcaatggaacgatctcagctcagctcactgcaacctccaccttctgggttcaagtgattctcctgcctcagtctccagagtagcttggattacaggtgcctgccaccatgcctggctaatttttgtatttttagtagagacgaggtttcaccatgttggccagggtggtcccgaactcctgacttcaagtgatccacccgcctcggcctcccaaagtgctgggattacagacgtgagccacctcgcctggcctatggagatgtatttaaaacctgggtcctttaacttctagtccatttttcttctctatgccatcatgatgccacccacatttcacggtaggggaaatggagatccagagaggtcaggtaatttgcctaaggtcatgcagcagttagaagcagagcctggccatttcatctgcactcctaggtctcagcagccttctcatcaccaatggctgggggtctcactgagaaggttagaaggacgaccagcgcattgcagaggctcacagccatgacagaggcccagagccagacctcctcaggttcctggggcaggctctcgatctgctgtccttctgcccctgcacactgtcaactccaatctcccctccagcctcagagtgagagtgacagacaggccagccctggccagcccattaaacctgacacctcctctcccagatttggctgtgggcctcccttagcctgagcaccatgctgcggcagctctgactggcactgaggtggggtggcggggctggcattcctctactatctcctccccatctgagctctgaggtggtgagcttggggatccagtcatcttgctctccttttcctttaccagtctcagaccttagtttcctgccaaaaaaaaaaaaaaaaaaaaaaaaaagagtagctctaccttaacccactagcagttagtgaaaaagggaagagagagtaagaattgtgcccaggctctgtatcgtccacaggccccctcccccaagaaaccttctgggactcatcccaccccgttccactccctctgaaccctctgcaccatttctcctatctcaaagctatgtgtctggctctaatctgagtcatgatgatgatggtggtggtggtggtggtggtggtattggcagtggcaatggaggtggtggtatcggttgtggcgatggaggtggtggtatcggctgtggcggcggtggtggtggtatcggctgtggcggcggtggtggtggtatcggctgtggcggcggtggtggtggtatcggctgtggcggcggtggtggtggtatcggctgtggcggcggtggtggtggtatcggctgtggcggcggtggtggtggtatcggctgtggcggcggtggtggtggtatcggctgtggcggcggtggtggtggtatcggttgtggcggcggaggtggtggtatcggttgtggcggcggtggtggtggtatcggttgtggcggcggaggtggtggtatcggttgtggcggcggaggtggtggtatcggttgtggcggcggtggtggtggtatcggttgtggcggcggaggtggtggtatcggttgtggcggcggaggtggtggtatcggttgtggcggcggaggtggtggtatcggttgtggcggcggtggtggtggtatcggttgtgccggcggtggtggtggtatcggttgtgccggcggtggtggtggtatcggttgtggcggcggtggtggtggtatcggttgtggcggcggaggtggtggtatcggttgtgccggcggtggtggtggtatcggttgtggcggcggaggtggtggtatcggttgtggcggcggaggtggtggtatcggttgtggcggcggaggtggtggtatcggttgtggcggcggaggtggtggtattggttgtggcggcggaggtggtggtattggttgtggcggcggtggtggtggtattggttgtggcggtggtggtggtggaggtggtggtattggttgtggcggtggtggtggtggtattggttgtggtggtggaggtggtggtattggttgtggcggtggtggtggtggtattggttgtggtggtggaggtggtggtattggttgtggtggtggtggtaatggctgtggcaatggaggtggtggtattggttgtggcaatggaggtggtggtattggttgtggtgatggaggtggtggtattggttgtggtgatggtggtggtggtattggttgtggtgatggaggtggtggtattggttgtggtgatggtggtggtggtggtagtggtgatagtagtaatggtagaggtggtagtggtactgatacagaaggaaagtgctgggaagggaagagcatggtccctttaaatgatatggaggcgggtaaggaaagtgctgggtagaggagggcgtggttcctgactagggctccacccccatggatctaggtgaggataggcattcctgtccaaatgttgcatttcccaagaccaccctggcctgccatgccccatcctctgcctataaaatccccgaaattctagcaggcacccacaaatggctggacatcaagaggagcatgtcagaggaggagcacgcgggctgctggatgtcgagaggaatgtaccgatagtccctggcatgatggcaggccatcgaccatcgaccagctgaactagcagagtttggctgaggcagagtttggctgggaagtcagaggagagtggcccaactgcaggggaaaaccatcccccttctggctcccccatctgctgagggctacttccactcaataaaaccttgcactcattctccaaacccatgcatgatctgattcttctggtacaccaaggcaagaaccccaggacacagaaagccctctgtccttgtgacaaggtagaggatctaattgagctggttaacacaagtcgtctatagacggcaaaactaaaagagcacatggtaacacatgcccactagggcttcaggaactgtaagcattcaaccctagacactgccatggggtctaagcccatctgtatgttcccctagaggtttgagtagtggtgcggggcactgccaatccccctgtggctacctgtgagggagacaagggaacttttctcgtttcagtactctgggatggtcagagttggataggaactcctggatggaggggaggttgactggttactaccttcctctatgtctccccaccaactcgtttttttttttttttttttttttttttttagagacagggtctcgctctgtcacccaggctggagtgcagtggcatgatgatagctcactgtagccttgaactcttgggctcaggtgatcaatccacctcaacatcccaagtagctaggactgtaggcacacaccaccatgcctagctaatgttttaagtttttgtagagatggggtcttgctggttactcaggctggtatcaaactcctgggctcaagcgatcttcccacttcagcctcccaaattgctgggattacaggtgtgagttaccatgcctgtctcctgccctcaactctttaataagatatttattgagcatcacccataaaataggtacatgctaagcaccttccatgtaataaatcatttaatccttccaacaatcaagaggtaggtactaatattttagagatgagatagcagaatcacggagaggttgaataatgtgcccaaggtcatacagctcacaaaatagcagagccttggccaggcatcgtggttcacacctgtaatcccagcactttgggaggctgaggtgggaagattgcttgagcccaggagtttgagatcagcctgggcaacatagcaagaacacatctctattttaaaaaattaaaaattggccgggcacggtggctcagcctgtaatcccagcactttgggaggctgagatgggtggatcacgaggtcctggccaacatggtgaaaccccgtgtctactaaaaatacaaaaattaactaggtgtggtggcacgcgcctataatcccagctactcgggaggctaaggcaggagaatcgcttgaatctgggaggcagagattgcagtgagccaagatcgcgccgctgcactccagcctggtgacagagcaagactccgtctcaaaaaaaaaaaaaaaaaaaaattaggagagcctagactcagccacagccccacatcagagtctcagctccaaccctgctctctcttcctgtctcctgagcagagctctctccatggggcagagctggtgggtaagttgagctggagacttctaggggctccactgtcttggggtttccagggctaggcagagccattctatcttcctgcctccacccaggcctccatcccttaggagctctgacaggggaggtgggatggtggattgagggggatgttaggctcctagtggcgctggtagcagtggggcggggctctgtctggcccggtggggcagctcactccacctcctggctggggctcccgcccttgggagttccatcctgccggcctctctccctcccaggatctcattatatccctaagagaaactgacagccttaatatcttactttgcaaatatagtttattccttcaataaagccgccagcgcaggggaatgtttaagactcgctctcccccgagagcctcatttgaatttctaaagtcttcagtcggcttctccaatggggcagctgggtgaggaaaacgcagcagccgcttagaggggattcatttcctgtctgggtctccgccgccgccgccgtagatgggggagctgaactgacggaaaggactgctggctgcctggatgctggggggcagaggacagggaggccttggcctgcgtctgtcctctggttggggcgggagggggtgcatgcctggctcatgctcacgtgggtgaatctgtgcattcactcgggggcctccagcctccatccttgtagcccaggttcttcctcgagggcccagctcaggggcccctccaagggacctctcagcccgggagctactctatgggatccccctgcctagggacccctccgctgggtctctacgcccaggggcccccaaacagtatctctcagaggcccaggccaccgatccctggggatggggcctcctccctggctggaccccctcactccagggcagcccccatcccaggcccccgtgggagtctctaattaaagggccggcacgccccttggggactcattaggcccactgtgcagagaacatttaatcattgctcagagcatcgattggaaaatcaatttctttgtctctccgcacgcggcgctggagaagtggggggagcgctgacctccttctgctgccatgtaaagtgctgcacatttaatcagggaacagaaatcaattagccacttacgaggctggctttagttaccgagtcggcagggcctgcgctgcagtttgacgctgacagaagcgaatctcagcgcgctgggctggtcagcgccggcccgtccccacagctgtccagggccctcggcttctctttcccacgcactagcacctgccatctagaaaggccccctagacccgccccacagaacccctgggaaggctcccaaccccccagcctccctcactaacctcctttcctgtgctcagttctgccaaccctgagaagccacctggagactcagatgcaaatctcagctgtgctgcagaacgcggagacgggtgcctgtagtcccagcactttaggaggccaagcctggcggattgcttgaggttaggagttcgagaccagccttgccaacatggtgaaaccccgtctctacaaaaaataaatacaaaaattagccgagtgtggtgatgcacacctgtaatctcagcgactcgggaagctgaggcacgagaatggcttgaacacaggaagtgaggttgcagtgagccgggatcgcgccattgcattccagcctgggcaacagagcgagactctgtctcaaaaaaaaaaaaaaaattatatggacatggtgttgcacacttgtagtcccagatactgggggaggagggattgctgagcccaggaggtccagactgcagtgagccatcattgagccactgcactccagtctaggcagcaaagcaaaaccctgtctcaaaaattaattaaattacacaaaataaacacagacctcagctttgcttcctactggcttccatgatatcagtgaagttttgaactggactctcaagcacactttgctcatcaaatgggaatagtaatagttacctaccttaccagcgtgttctggaaattcaatgtgatcatctttatgaagctactaccaaatcgagctcaattgaagagaactttgaactcaaatcagcgggaccgtgcccttgccaccccacagtcagccagggcagatgaggggacagtgtgtgggagtgggaagggggacctctggccactgctctccttcaggacaaggacaggtgggcccagtgtccccctttgcccactctcgtttccctactgcctcctgggggttgggccggaagcccctttgcacctactctccacctcctatttgtgcaccccctatagccacgcatgctggctgctccctcacctgtgactgtgcactcccccccccaggctttccagtgatgtctcacgcacccagagttacatacacccaattacatagagttggacgcggtctgcacggcccattgcacaccgtttcgcagtttctcccacagtcacagtcccagcttcctggtgctcacacgcagcttcacacacaagcaccctcacccagcgccacccgcatgggctcacccgtgggcccccaccccacagagttgcacattggtggcacacacgcatgcacacacacacgcactcacactggttccgtaataatattagacatgccatttcttttgcatgacagttccagtggagatgctcagagctgtcacttggatgaaaaataatgcataatcctcatcttccttccttcccttccttttctttcttccctgtttaatgagctcctaaaaatattccttgccgtctcgccgaggctgtgggctaactatgagtcgggcctcccccaccaactgtcaccatcctcgttgcctccctcagccccctgagtgggatggagggtgaagcggtacagtgagtcctggtggttggcccagtggaggtcaggccaaggggctctcacccaggcctcccgaagatctcagagtcccacttgtcccctctcttggctagcccacttgagcaggggatgagagaaacagagagacatgggggaagaaagataggcaggaatctcctttcggtacctgaccactctcagctaccccctctgcagcgcctgagcaactgcacaagaccaaacttacctatcaccccttctaccccaagaagaaaaggtccctctccacccccttgcacacctggttcatcctccctcccagaactcaaagtgaaggggaatgggagagacagtcagagccccctctgacccccagcttctcccagcaccttatcttggctctgttgggaaaactgcagtgctcagtttcctccagttcatcctttaagccccagatcaaagtcaactcctccctgaagccttcctgattcacacagaaggggatatttgttcactgcagatatcaacacactttaataataataaatttaccagccaggcacggtggctcatgcctgtaatcccagaactttgggaggccaagaagggcggatcacctgaggtcaggaggtcaagaccagcctggccaacctggtgaaaccccgtctctacgaaaaatacaaaagtagccaggattggtggtgcacccctgtagtcccagctactcgggagtgggaggtggaggtggaggcaggagagtcgcttgaaccccggaggcagaggttgcggtgagccaagatagtgccactacactccagcctgggcgacagagcaagactccatctcaaaataaataatacataaataaataaatttgccaaggaaagctattgtgtgtggtacctggtgggaactcctgtgtgtcgtttccttatttacgtgagtcattctcaccggatctgagtccctcccagctggggacctcactaggccacccagctctggctaagtgagagctcatattccccgagcggttggagggacagatggatggattcatggacagatggatgggagatggtgtaggaggaggagttcagggtcccgagtcaggggcctgaatgttcacccagttcccgcccacattcactgagacttgggaaaggcaaagctctctctaggccttggtttctccatctgtaaaatgagagagctgggtcaggtggtgtctgagagctcggaggtctcttgcagctcaggtaatcttcattctgtgattctctacagtgtcaagcagagtaagcctttctaatgcttttcacttcccgccttactggctgcaagaggctgggtggtatgacgaacaggacaaggagctctctgcacagctatctggagctgtgttttcccagcctgtcctctgtctcctacttcttccatttttttgttctagtctccttaattccacttttatgacttcctttcattctgttccttttcttgctttttctgggcccgcatcctacccattagtagctcatagtgagcagccccctctgcctcctttcctctgcctccctctcccagctccacctgcttcagaagccccctccctgtggcctccccatctcatcccagcagctccagtcccgaaaggttaagctaatagcaactccttccccatcagctgctcttgtttgctctacataattgcaggagaggggggctgagatgggagggccctctcagtggttacgaggtatagggatggggctgtgcagccttgtccctgggaagcggggctgggggaaggtggtacttacagaaatgcagtggtaggctgtgtgggagctgatccaatgggacaagaattgggcagaaggccagctgcagcatagatgcctagagaagggggagtggagtccagagaggggctacaaaggaggaaaataatcatgacagtggccataagtggcatttgtcaagcacgtactatttgccaggcactgtatcaagcactttactggcgttgtctcactgaatcttcccaacagtcccaggaggcaggttcagctcttgtgaacattattttttttttcttgtgcccattttacaggaaactgaagctccaggaggctaaatcattgtctgaagtcacgtgttgctaaatggcagagcctcaagcagagactgctgtcaatcactcctgctcagagacggtcagggcttgcagggacctgggaggccattgggtccaacccattcattatccagagggacagagggagatagactagtctaaattcacacagcaagttgttgacacaactacgcagagaatccaggcctgatacagaaggagttgttcatcttctgagcctaagtccccctggagacttcctgtggatgggtgcttgggtgaagggtggtgatgtagacaaggccagccccagctggagaaggccatgttgtgcgtggtgtgtgcacagtagaggggaggcccacctggagagctccacctgtctgccagggagcagcagccctggccttttgctgggttgagtatctccagtaattcaacaggagcctaggggagcccaaagcagcacacatggaaggtggggcaggctgtgtcacagtcagtgggagtgaatttaggtcagccctgggaagttggatcaggaagtcagtatgcctgggtctcagtccatcacagctgcagacttggggctgtgctggcctccacattcctgcctctcatctcaggtcctgtctcactggcacatctgctccaatcaggacagcttacctcttgttttcctccaagcaatggacactctcaaggcaggtacttcctcccactttagatttgagggcttcccaaagcaaggactcttatcacactggagcttcgaggacagggattgagtctcctccatcagagtggacattcacctaaggctgagattgtgtctcccccatcagaggccccctccagcctctacccctgtgatctaatggtcatagcagctccagcattggctccatcctgaaacatccaccccacccccgccccatccccatctcacagcaatgagttaccctgtcccttcccggctcctgcctggggacccatgagactttccttgcagtgatgtgctatcagatgggttcagctctgaccaagtggcccccttccctctgcctggacccttagcaatggtcgtcagagcagctaccctctgtcacttcgtggtgagcatccataagcccttggcagggtatgaccctttcccaccactcacaccacaaatgggaccctcacaacaatatagtggcagggctgggggagaggggtgcctcaaaggccatctttcttgagagggggggtcttctaggctctgctgggacacactgcctcttgaagtagggaagctctctcttatggagaatgacctgcttttggagaaactatcctcagaggaagccaaaatccatctccctgtgactgtcccatggaaacccaatgctcccgctcatctgcctgcaactctgcagcttgcccagtgctgggttactcccatatctgcagctcaccgcgtgcccgggtgcaggcccccagctcccaccagcactgcagggggcagctgtgaagggcctggcggatgagcaggcaatctcatttgtattctgagtggccaggctgtgccatggctttctccaagagaaccctatcctctccctcagctccgtctttcaaaacttctccaagcagcatcaataatgggaatcgattcatcaatgagcatcctggcctctcaggccccatccccactgtggagctttgctgcatccctaagtacttcagcttcttgcccactccatcccccatgtcccatgcagcacttctagggacctggccctgccttccagcctgccaggatcccaggagaccaagcctccacctctgcctccggacagctttactttggctgagcaaggaggatagcctaggcctagaggaagacatgagggcagcgaacctggggctgagctcagagctgcttgagcccttcaggccccattcagagtgggagagggggtgtcatgccttagagatgtggggactgacccccttatcccagcctccaaacactgacgacccaacatcaacctcttaacactgcctagctaagactgatcatccaccaaagtactgaccacccactgacccaacccagcctcctaacactgatggcccaggcccagccaactgtctaatgtctccccaaccatccactgatcagcttgatggcccaacagtactatggatgcacaaccagaaccaactgcctgtcatgaccacccatcaccgagatcgctacaatcaacatccaataatgaccttcactacagacctaccctaatggaccaccccaaattacctgtccgtaaccagtctccactgcccatctatccaacaaggatcccccaatcactgatcatcatgtcacttcctgctggacccttgtgtgtcaccagcaactcttcagatggctgctggctacagctagatttccctggcactggctggaactaatctgaacctcctccagctcctaggacttgtccagttggccagtggtgaagctgctgggtgtctagacctgtccctctccttctcaccaggccctatcgactcctaccagccagtactgcccagctgcactacagttgggatgggaagaattttcttcactgcagaggaaggaggagaggggaggcagaggaggcccagaagggcagaggctgggagcaaggggaggagggaacaaggagttaagaaatggccagggcaggtcaggcacggtggctcatgcctgtaatcccagcactttgggaggccgaagtgggaggatcacttgcggtcaggagttcgagaccagcctggccaacgtggtaaaaccctgtctctactaaaaacacaaaaattagctgggtgtggtggcatatgcctgtaatctcagctactcaggaggctgaggctggagaattgcttgaacctgggaggtggaggttgcagtgatctgagatcatgccattgcactccagcctgggcgacaagagtgaaactccatctcaaaaagaaagaaaggaaggaaggaaggaaggaaggaaggaaggagggagggagggagggagggagggagggagggagggaaggaaggaaggaaggaaggaaggaagggcgggccagggcagaaaggaggctgagaggtgggaagggggtgcagttctcagcatgtcggccctgcgtgctgcctcggcccctcctgacccctcctggctgcccttgcttgatggaaagctccacagagacttggagactcaagcagagcaaaagctcctgatcccccttcaccagggactgaggaccagggccattcattagacgaaggagcagctgctctgggcccagggaccgagtggcaggaaatcactctgtctctggaagctgtggcctggccccggcctcccgggttgggaggctgtctgtccacccttgtgctctgtggggcccacccggggatctgcatgtgctaactgtaatccctgcctgctgccaaccttggagccaggcccaggagattccatatgcccgaggagaaaccggctcctggactgactctgacttgccatggtcaagtcatgtcccttccccaggcctcagtttccccatcattcaatgaggagactcagttctttctctgaggaaggaagctgtctctggctgccctgaggggggatctctgggctctcttcgtcctctcgtgggcaccaccataggccccctggacttgtctggagctgaaacaaggctgagcccagtggcaatgacttctggattctgggtcctttatctgctctctagccccgctttgggaagagtcaccgtctgctcgggtgctggactcacatcaccggctgaagccggcggggctcaggagctggaaggctgctcagggctgctggctcaagacagagggcgaatgtgggaagcacaaagggcttggggagctgagtaaattggagatgggggagatggaaggcaggccaaacgtcaagatacccaccccgcttccactggccacctccagacgatacggtggaaactcgtagagtgatgcaaggactgtcctctgtcatgagaacgttctgagttggtgggaaggagacaagatgtcccagtggttcctcccagctgccggcgtctctgaggctcggagtctaatgctgaccaggcagcagctgcctgctctgctgtttcctgcaggggtggggacaagggagatggataagatgtggctcctgatggatggggtcctttctacccagtggaggagatgggactgttgtccaagaaatcacaggagtgcagcattcattgagcctctacgtgtagatacacacacacacacacacacacacacacacactcaaagatggcaggagtgaggttgcttggtataaaccacaggagttaaggaaggaagaactcaggaggcttcagacagctcggaagccttcagcaggaggcaggagttagtctgggtcttcaggactcctgggacatggcttcatggagaagagggtagtcattccaggcagagggaacagcccgtgcaaaggcacagagaggggatggtgggaacacgggcaacagaaccaacttgcaggagccaagggagcaagcaggatatggaagaagctgaggaggagtggtggttaggggacctctcaaatgcccttttattttatttttacgttttattgttttgagatggagtctccctttgtcacccaggctagagtgcagtggcgcgatctcggctcactgcagcctccgcctcctgggttcaggagattctcctgcctcagcctcccgagtagctgggactaagcacacaccaccatgcctggttaatttttatatttctagtagtgacggggtttcacgatgttagtcaggctggtcttgaactgctgacctcaaatgatccacctgcctcagcctcccaaagtgctgggattacatgcgtgagtcatcgtgcctggcctcaaatgctcttttaaggcatgaagattcttttctgatccccacatatgagcatatggtatgattggttgtgtatgcttaagggagagatagggcaagatgtttgaaatatgggccattttagaaaagcaggcaattttggcagtggaaccttttacttttgcattttcccagcccttcctaacttgcaggtcataccaggtggagctgggggccatcttccaggaacgtgcatccccagaggtggatagaggaggggtaccatttccacaggacacagccaaggacctcgtacctacgtgaggcacagggccctgggtatcctgcttcctgactttgcctgcctgccctaaactaagctgcccttcccactttagttcaaaaccaatcctgttcttgctggtcccaggcctcctctgaacaggatggaaatcaatgaacaacttgctgctatttgtagatctcatttccctgctggtcccccaaccctggatgatcctgaccaagttcagccctgcccatgctactcagtcagatgcactggcactgtgcccatccactcggagcccagtgctcagtactggggctggcccaggggagccgcagcccagaggcccctgcagggggcagggcttatcctttagctgggactagagggtatggatccctgagagcctagaggagataaggacaaagcacagactcaggaatctgaactgttaagaaaaccctccaagggattcaagggaagctggtgcaagaattgctgggaaatgaacagcaagcactggctactgtcagcttcccttccacctgctagctgtgtgactttacttaccttctctgtgcctcagcatcctcacctgtgaaatgatggcacgaagagctctggcctcgttgagcctctgcctggagggttaacagaggaaacataggcatagggcttaactcaaagccgagcacttaacaggcattcgtcagtgattgacagcagcaagtgagaccaagggccaggagcaccagcacactggccttctgcctggccagccagcccctcctggacacccttagggtccctgggtgggtaagcttggtaacctgtcctagagcagtgtgcccatgctgcactcaaggcccatattagtcccctggatgatgagcgggagaggctcccaggaggatgagcaggggtaggcttggcctcgtggagggaaacaaaacattgactccctaggagttcctgatctgccagtcaggatgatgctgttgaggaagctgtaaggtgtcgcctttaggaggggtcagggaggggtcccagcaggaggctagacacttccatgggtgctcagtccctcaggttagagggaaagccatacagagcctggggtggtgggggccagtaaggcagaggggagctggatgcttccttcccactgggggtgggtagtcaattccaaagaaccacaaccctttctcttctttgatctctctctctctctttgttgccttgcctgtatgtatggtaaagctttctcttcttcaaaggggccccaggtgcccaagactcccttcccactaccttgagacacacagggcataacagttacaaatgtggagttcagctcagcttgcttggtttcttttttcaactttattgaagtataatttacatacaataaaatgtacacattttaagtgttcagtttgatgagttttgacaaatttatagacacatataactaccactacaatgaagatatagggcatttgcatcatcccaaaaagctcccctgtgcctcttccccgtagttccccacccttcccccagcccccggcaaccactgatctgctttctgtcactatagattagatttgtcttttctggattttcatataaatggaattatgtaatatgtactcttggtttctggctgctttaactgagcagaatgttgatgagattcatccttgtttttatggtggtactttattctttttgttgctcagaagtatcccattatttgcacatacaacaatctggccacttgctgatggacatttgtcttgtttccagggtttcagttgctgtgaatgaagctaccatgagcatgtgtgtacacacaggtctttcagtaaacatatattttcatttttcttggttaaacacctgagagtaggataaccgaatcttgtggttattgtatgcttaacttttcaagaaactgacaaactgttttctgaagtagttgcaccattgtacatttccattatcagcatgtgagagttccagttgctccacaagctcatcaacacttaccatggtcagtcttccaatggctgtgcagtgtatgtaattgtggttttaatttgcatttccctgataacgaataatactgaattttttttcatgcacatattggccatcctatctcttcttttgacccttttacgatgggattgtttgtcttcttcctattgaattgtaagagtttgctggatacaagttctttgtcagatatatgtattgcaaatattttctcccaggatatggcttgccttattttcttagttgtttatatcttgattctaggctgggcatggtggctcatgtctgtaatcccagcaatttaggaggccaaagtgggtggatcatctgaggtcaggagttcgagaccagcctggcccaacatggtgaaaccccatctctactaaaaatacaaaagttagccgggcatggtggcacatgcctgtaatcccaactactcaggaggctgaggagtagaattacttgagcccgggaggtagagttagcagtgagccaagattgcaccactgcactccagcctgggtaacaagagtgagactgtctcaaaaaaaaaaaaagaaagaaaaaaaaatcttgattctattagttccatgttgtgcactcttgaacaaggtacttagtctttctgacccttcatttccttatcaataaaatgggtctaaaagtacctagcatatagaagtgttgtgacatttaactcaattaatatatgtaaaatacctaaacccagaggaggtcttcaactcgtagtggtcattactgctattattaggctggtgcaaaagtaatttgctattagtttcaatgacaaaaactgcaataacttttacaccaacctaatattttcaggcagttaatggcttctctttcccctctcctggatctggccctgataggttgatatctcttttctgtccatctagctcctgaggatcccatgggcaggcaaggcagggacaggatggaaataggatgatgacttaagtcatcctgtgcccatcctgcccagacacacaaatttgggaaccacaaggtactgagcccaggggcccaccatcctggagcctcagagagaaggaaaaagtctctgggaccccatagctcctacttgtggacccatgcacattcacaattccttagtcacaaagtctacacaaacatatgtatgccaccccatcacactctgcctggcacctgcacaaactcagacacttacacgggaagagaaatgcagccatcactctactccccaacccccactgccactgatcaggaagagccagcttactggccagaccatgcataattcagaggtttggcccaaaatagttctatcaggcccagattctccagtgggggctaggggaggagcaggagcagcaaagggagtggggagagacatctcaacttggagaagaccctagagtctgcctcctgccctaggtgcctgggcagagcctgggggccaggggaacttcagcgcagcctgaagcactcacttcccaagttccctctcccccccacacatccccaaatcctcccaccctggggagacagggtcacccgcaggcagctgggagtgccaacacctggccattcacacctgctggggcctggagtcctcacctgtgtgtgtcaggctccccagcacctccccagggcccaggctgagagggacactgctgagttctcaggcatctttgtcccaggtctcctgtcttcacttcaccaatcaatcagttgataagtccacaaatatttactgagcacaagcccgggcaaagctgggtcctaggacttcagagggcacctggctgtgcatggagaggctcagaacttgctgaggaggcaggaaatccacagaaaggacaaagactgggtcagagagggacaggccatggagctagggatgcaggcggggaaaagcttccagctgaaagcctgacttgagctgggcctgcccaggtgaaggcctggattcagagagatggaaaggcaggtgggagggacagggtcggctggatgggggcagagggtccgaggctatctggatgttagtaagaagattggctgatggaactggagtcatgtgaggaagtcatggggcaggactggcatggccttcaacctttggtagttcaacaaggatggggactgcaccatatacaactcccgggggtttcccaagattctccaacgtgatgttaagtgctttgctttggagtcagcctactgggattcaaatcccaaaatcactatgtcattgccccatgactttgggcaagtgacttaaggtgtgtttccttatgtgttaaatgggggtaataacagtttgtaccagccgggtgcagtggcttacacctgtaatcccagcactttgggaggctgaggtgggtggatcacttgaggtcagaagttcaagaccagcctggccaacatggtgaaaccctgtctcaccaaaaattagccgcgtgtggtggcacacgcctgtaatcccagctacttgggaggctgagaggctgaggcaagagaatcacttgaacaagggaggtggaggttgtagtgagccgagatcgggccactacacgccagcctgggtgacaaagctagactccgtctcaaaaaaaaaaaaaaaaaaaaaaaagtctgtacctcttggccctgtcgaagagattaaataagaagtggacatatattgggaggctgaggtgggcagatcacctgagatcaagagttcgagccaacatggagaaaccccatctctactaaaaatacaaaaaaattagctgggcctggtggcagatgcctgtaatctcagctactcaggaggccgacgcaggagaattgcttgaacccgggagatggaggttgcggtgagttgagatcgtgccactgcactctggcctgggcaaaagagtgagaggccgtctcaaaaaaattaataaataaaaagaagtgcacaaatagtgctcggcttgcctcccacgttcttcccacctgcgtggagacagacgcagcagcacagagtgtcttcaggacctgggtggctgaccaggagagagtgttactgcccagcagtgaaaagatggtgttggtgggccgggtgcggtggctcatgcctgtaatcccagcacttagggaagctgaggcggcgggtggatcatttgaggccaggagtttgagaccagcctggccaacatggcgaaaccccgtctctacctaaaaatacaaaaattagctgagtttggtggtgcgcacctgtagtcccagctactcaggaggctgagacacaggaatcgcttgatcccgtgaggcggaggttgcagtgagctgagaccacgccactgccctccagcctgggcgacagaatgagactccatctcaaaaaaaaaaaaaagagagagagagagatggtgctggtggacagaaagcaagagggccttctgacggaggaggtctttcagctgtgatttgagacaaggtgcctgatccagaactagaggcaatgtgaactggtgggcccagtgatatgggggccatgtaatccgtggaacaccacactttccatgacaccctgggagtcacaggagggttttggttttgctttcctgtgttttttccctgcacagagtctgaatgagggttgctttgactctacgttctgaaaggctcctttcctcctctccagctcgggctccatccatctctttgggcctctggctcagtctctccatcactctgcctccacctcttttggtcttactgattttgtctttccctgagcccctttctccctctcttcctggttccaagcctctcacaggctctgattccatcttccccacctctcctttgcgctctctctctctctctctctctctctctctctctctgtcgtctctccagggacctttgtaaaactctgcactctcttcctggagactgggggcagctggggagtggggatcggagtccctgcctctaggggcccatgccccaggcccagctctgttgattagggcttttttcagaggactggagacatcaatgactgttacaagcttcaccaatgctgctaatattagcccaggaaggcagctcactgatggattaggagaaattaagaattcaaattctgtaattcgaattggagggctgctgcttgctgacagctaatacttccccagaaattaatacttccccagaaattaatgagtgaaggagggatggcagcactggttttcttctttgacaatacaattttcccccgtgatccacacctttgaaacccccatctccaggcaggcactcgcctgaagggccggggtcctgtttgtctcagatcttatttgtggattccagaaattctcgggaagtggccttctcattcccagctgagccctctgcatctgcctgctggtgcctcagcatgaggccggctggctctgggagaggcaaggtgaagctggagaaaggacagggtcagggcaccggcagagcttgctttcagtcccctcctggctgtgtgtgaccctgacaaaggtccgaacctgtctgtaaaatggaaattataatttcccgcattaggggatgttggaggcacagaggcaagcatctcacagctaccttccttcctctctcaccgcttccctttctccctgggcatttctgctgtttggtccttcagaatacccaccaacctcctctcagccaaaccacactgagacctccttgaaactgcctccccaggaagtctgcctgggcttcgttctgttgagattgactggctcctgagtgctcacggcctcatttctgaaccatctctcctgctgtctcagagttttagatgatttctaagaagagagtgtcctgtctcccaaaccagattgttattctcctggaggtggcactggccctgtgcctcaaacccaataggtgctcagtacctggcaaatgaattgaaccaacaccttctgtcctctttgcgcctgcctcactgtcccttcacccatgcccagtgatgcttgttgatggcaggtgggtgctggggctggggtctggccagtcttccctgcagtcccagtgcccatgtcttgggtgggggggaagggtggtgggggagacacattcctgctgtgagtagtacattctccaaaatggcacctttaaggcattatatatatatatatattatatatatatataatatatataatatatatatatgttctcagtctgttgcccaggctggggtgtagtggtgccatcacagctcattgcagccttgacctcccaggctcaagcaatcctcctcctttagcctcctgagtagctgagactataggcatggctgtacccagctaaacttttttttcgttttttttttttttgagatggagtcttgctctgtcacccaggatggagtgcagtggtgagatctcagctcactgcaacctttgcctcctgggttcaagcaattctcctgcctcagcctcctgagtagctgggactacaggcacgcgccaccacacccggctaatttttgtatttttagtagagacggggtttcaccatattggccaggctggtctcgaactcctgacctcgtgatctgcctgcctcggcctcccaaggtgctgggatcacaagcatgagccaccacgcccagccacccagctaaatttttaaatgttttaacttttttagagactaggtctcctaacactgcccaggctggtctcaaactcctgggaacaagtgatccatcagcctcagcctcccaaagtgctgagattacaggcatgagccacctaagcgattttttttaaaaagtgttgagtgaggcaggaggatcacttacgcccaggagtttgaagttacagtgagcaatgactgggctactgcactccagcctgggtgacagagcaagaccctatctctaaaaaaataaaaaatatttaaaaagcattggctgggcactgtggcttatacttgtaatcccagcattttggaaggctaaggtgggaggatcacttgagctcaggaggtcaagactagcctaggcaacatagtaagaccccatttctacaaaaaatttaaaatattagccaggcatggtggtgtgcacctgtagtttcagcttctcaggaggctgaggcaggagaattgcttgaacccaggaggtagaggctgcagtgaactatgatggagccaatgcacccgagcctgggtaacagagcaagacctcatttctaaacaaaataaacaatttttaaagaagtgttgacatggtgtttgttaaggtgtggagaaaaggagttacagagagccctgagaaagccagacctcaagaccatgaagatgcgtccttcctcctggcccctcaacctttcagcacacccctcccctctcctcctgccccaatcccaggcccactctcgctcctggcacctggctgagctctggctcggggtggggagggacatccttagctgcgaggcagatgggctctacaaggctcagcgcctacaagcccctgcagaattggccaccaaagagttggtgctggacttctctagcctcatggagagccagagcacagggagaaccagtgcaaatggcttccttcgttcctgggaggggtcttgggggtcacctaggaccctctctttgacagatgggaaaaccaaagctcagaaaggttagcatatgttcaaacaccagtcatctgtctagcagggagaaagggtgatcccaggagcagataaatccaaatccctttcaaaggccctcctggatcctggaaaatcaaatgttctttccaactctgcttccttgggctagtgtttgagcaaaagtctattccaggtgggctgggactgggggcagaggagggaaggaaattggcaggaaagtagttttctaagtggctgatggctgctttgggcaggagacaggctgctaggaacctgttccctccaaccccctccaaccccctccaaccccctccaacccctccaaccccctccaaccccctccaaccccctccaacccctccaaccccctccaaccccctccaacccccccaaccccctccaaccccctccaaacccccccaaccccctccaaccccctccaaccccctccaaccccctccaaccccctccacaacccacttgcctgggaagcctttctccccacacccattttctctttccggctgaggcttaccctccatctacgatgaacgtggggggcctggggagaggtagggggctgggaagcagtcctgtctgcctttcgaacctcatgggcaggtggggctcccctgcctgacattcctatgctgctcccgcccccgcgtggctcctctgatgcccaaatcgccttttcccagatccaattaaaacagcgtttggagcaaggttgaaataatcacataataattttctccagtaaagttactggctggagcccgatttgaaagctgagctggtaattgaatctgaggggcagcgacagaagaggagctggggggagtggtggagactccttgtggggcccagaggctcccggctgtgattacccctcccaccattggtaataggtgttgcaaccccctcctactgtccatctccatttcactccctccctctagtaacagatgtctcttggggctacagaactcccagacttcaacaggagaacaggcccagagcccatgccatcagactttctcggttcacaggccagactggggaggccacatgcccacagtcacccagagaggtcaagcaaagccaggactccaacccaggtctcggactctccagccactgttttttttgtttttttttttgacagaattttgctctgtcgcccaggctggagtgcagtggcacgatctcagctcactgcaacctctgcttcccgggttcaagtgattctcctgcctcagcctcccaagtagttggaattacaggcgcatgccaccacacccagctaatttttgtatttttagtagagacgggtttccaccatgttgaccaggcttgtctcaaactcctgatctcaggtgatccacctgcctcagcctcccaaagtgctgggatcacagatgtgagccactgtgcctgacccagccactgctttaatctccacttcaggtttcctgactcccaggccctccccactctctcctgctctgcccatcttcctccaccatctcccaggatttcctggtcccaccctaacctctctgcagcagggaggggaagtgactacctgcatgatctctgggccagcgggctgtgcagcaggggctccctgcacatcaacagctgacatgaccagactgggcagccctgcttggtcctccaccatgtcctccctctcagcatttgactgggggctcagactatctgccatgtgtggctcattcatttcttccctcctccctttctttcctccactctaaatattctttatgtccctactgcctgtgaggccctgagcaggatcctcccgcaatcgggaggtatagacagagcggcagctgtgctcacaggcccgtggcagaggtgagcaagttaacacaacaagagggggccctcacctgcagctgggggacggggcatcctggctgaagtgacctctaagctgacgtctcaaagctgaagagaagtgcgtgactcaagacaaatgcaaaggctgggaagcaggaaacgcccgggtgtgatcttgggcaagttgaggtctcagtttcctcatctctagaatgaactcctggctcagtttgcctcgtgagattctggggaagaacgaacatggaggtgtctgtaagatggaaaatcccacttaactgatgatcgttttttgttttttttgagacaagattctacccttgtcaaggctggagtgcagtggtgtaatcacagctcactgcagcctcgaactcctgggctcaagcaatcctcctgcctcagcttccccagtagctgggattacaaacgtgagcaaccttacctggctaattttctttcttaaaattttgtgtagagacaggggtcttgctatgttgcctgggctggtctcaaactactggcctcaagtgatcctcccacctcagcctcccaaggttgaggattaaggcgtgattaagtgctggaattacaggagtgacccattgtgcccagccaatgattgttgctaatggagggcatttgtcccctatcctagacaagggacagagtctgggggcggggtgggtcagtggtcggggtggtgagggaggccggaggtgggaggaatgggaatcgaggacttgctctgcagagtccttgtggctattcgagactggaagccagcagctggatgggggcgttttctcaccacatggctgggagttgtggggatggaagaaaccatagggtttggccgggtgcggtggttcacacctgtaatcctagcactttgggaggctgaggcaggtggatcacctgaggtcatgagttcgagaccagcctggccaacatggtgaaaccccatctctactaaaaataaaaaccagctgggcatggtggcgcgtgcctgtaatcccagctactcgggaggctgaggcaggaggatcgactgaacctgggagatggaggttgcagtaagccaagatcgcagcattgcactccagcctgggcgacagagcaaagaaaccacagggttggtggctgctggcagggctaagtctggttcctctggccagtgcccagcttccccacgctcactatcctctgggcctggggcatgctaagccccaggagtcaaggtgggactctgaagggatctactcccctccctgcacctctcagccaatcaatgtctgctctgccctccctgacttcagcagagttggtgccagatcctggaactcactgattggttgagggagcaacccctctgcccacccctcaccatggaggcttttggagagacctagccatgggcaagctttgtgccctgcaaatggctcagtggtaccaaccactgagctgcctgcccctgggccctcataagaccatgtctgcagcctcagtggccttctgggcacggctggcctcctggtcagcagctgtaggggtgagtcacggctctcattagagcttaattaatcaattgagctaatcagacagctgtgatgtgctgtggttgcagatgggggggagagggagagagttggagcgtgagggactggtaaggcgagctggggctggcagggcctggagtggcggcagggcctggagtggcaacagagtctggtgggttggcaagggcggagggcgctggaaaggaggatgaatgatcctgacaaaggcccgtgataggttgctctgaaaggtgaccttggcaaggtgccagagaccgaggctgggggaggaggaagcaggacctctcccacctccagcttcctctctcattttttatcttgttaagtgtgtctccaaagctttttgaaatcctccactgaatgggatgggaaaaggagacaaagacaaaaaaaggtaggtcctcacattcccagtgatcccagtctgatgggggaggccagaggtctactggcagcacagacagagacccagactaagagatggagacagagacacggtgtctctccaggtgagctgctcaggcttggacatctggactgggtggatggggaggagccagagggaccagagccaagggtaggcgggagtccagtaagaatattgggaggaggggagcgcctgagcgggttttacaatgtgatgtgcaaaatcttgtttcatctatttttttctcacatccgaccttggtgttaccttggggtggggagcgagcagggcaggaagtgcaatggtgggaaatgggttccgagaggactcatggacagctgggatagctctgccctccaggggcttccatttccagaggcttaccgggagtctgaggctgtgagagagaaagatccagggcctgggacatgcaaggggctacgggagatggatcagaggagggcaagcatttctgatgaggctacctggtaaggattcctcccagaagaggtggcatttgagccaggtctttcagaatggatggatttcaatcagcagaattgggtgtggagaggaagaaggatgttgcaggaggagaagcggcccaggcaaaggcagagaggctggacagccttaggcagggccagttggcacagcaagttgggccggaaacaaggttactgtttgtgtcaggtggaaagagcttgatggtgaagggctcttggaatcccaaaccaaggagtttgaaagggaatttggtagacactaggaatcactgtaagtctctaactgggaagaataggctgaaagtagctgtacagagaggatgtctatggaaacagttctttgtaggatggaaccaagaaggaagaaacctgaaacaagaagaaagaaatggcaggtgtggtgactcacacctgtcatcccagcactttgggaggctgaggcaggcagatcacgaggtcaggagttcaagaccagcctggccaacatagcgaaaccctgtctctactaaaaatacaaaaattagctgggcatggtggcacatgcctgtagtcccagctacccgggaggccgaggcaggagaatcgcttgaacctgggaggtggaggttgtggtgagccaagattatgccactgcactctggcctgggcaacagagtaagactctatctcaaaaaaaaaaaaaaaaaaaaagaagaagaagaagaagaaagaaagaaaggccgggcgcggtggctcatgcctgtaatcccagcattttgggaggccaaggcgggcggatcacttgaggttgggagttcgagaccagcctgaccaacatggagaaaccctgtctctactaaaaaatacaaaagtaggcaagcatggtggtgcatgcctgtaatcccagctactcaggaggctgaggcaggaggatcgcttgaacctgggaggggggaggttgcagtgagccgagattgtgccattgcactctagcctgggcaacaagagcaaaactccgtttcaaaaaaaaagaaaggccaagtgcagtggctcacacctgtcatcacaacactttgggaggcagaggtgggagaattacttgaggccaggagtccaaggtcagcctgggcaacattgagaagccccatctgcacaaaaaaagaaaaaaaattagctcgctgtgctaatgcactacaggtgcatgcacctgtagtcctagttacttgcaaggctgaggagggaggatcacttgagtccagcagttgtagactgcagtgagctatgaccatgccactgtactccatcctgggtgacagagcaagaccctgtgtaaaaataaatacataaataagtaaaagaagaggctgggccaggtggctcacacctataatcccagcactttgggaggctgatgcaggcagatcatttgagcccaggagtttgagaccagcctgggtaacgtggcaaaatctggtctctaccaaaaatacaaaaaattagctagatgtggtgttgcgtgcctagggtcccagctacttgggaggctgaggtggaaggatctcttgagcccaggatgttgaggctgccatgagccatgtttgtgccactgcactccagcctgggtgactgagggagatcctgtctaaaaataaataaataaataaataaataaataaataaataaataaagttaaatcccagatctatcccttagttgcagtctgcaaaagaaataactgaggggctgggcacctcaaagtgtaatcctagcactttgggaggctgaggcaggttgatcacctgaggtcaggagttcaagaccagcctggccaacatggcaaaaccccgtctctactaaaaatacaaaaattagcgggtatggtggtttgactataatccagcttctccggaggctgaggcaggagaatcgttgaattctgggggcggaggttgcagtgagccaagattgcgccacttcactccagcctggaaagagtgaaactcaaaaacaaaaacaaaaacaaagatataactgagggctcactgtggctctcgggacctggcaggtgggctgggggcttggtcctggggtagcctggtgcttctctccacactcctccccaggcagggcaattgtgcagctaggacagggaagaccagtgggaagtaggggctgggaccacttgggcacaagatcagctggcccaggtgtgagattcaggtttccaggtccccttccctggctcccagcatcagcagaaaatgtcagactagacccacgagggcctcccagccagcactcggctgcctttgcattgccctgaaatagccctgtccactccttcccacaaaccctcgcgcctagagcagctgagaaggaggtcctgggtatcctggccccaccccagcgtgtccagctcacccactgctggatgtgctgtgtggctctcagaaaatcacaccctttctgggccgcccatcctaccctctttctccagcctcccactgaagttggagggcccctgcagactctgggagtacagccagcaatagccaaccaagggaggggcggcctcaaaaggggctccctccctccctcctcactttctcttttcctcgcgcacgttcatggcttacaagcatactgtctttgtataagaaacctttttacagcctttaaagcagggttgatcacagctattcccatttgagtgatggtgcagttccaagaggggccttaccttagatgctacagccagaagactaggcactgactgggaatgagaagtacccaagcccagctgtcaggctcttccctccaaaccagctgctctagttgccaggagactctggaaaggagagctcagtgtctgccccagcccggcccctatcctggcgaagtggtcattagtctgcctcccccagagagcccctgctggggcactgtaatgcctcagaggccagaaagttgctcccacccccagcaaaaggggggctctgccctgtatttctcaggggctcacttcaccttctgcctccagaggtccctcctcactatcacagggagggggcaggggtcggggcagaagctcctatcctgtgggcttctcattccagatctctgctggcccggtgcggtagctcctgccacatgtggcttcagggcacctggaatgtggctagtgccacatgctgaaatgatattttagatatattgggttaagttaaaaaatattatttgaggccgggcgcagtggctcacacctgtaatctcagcattttgggaggccgaggtgggcagatcacctgaggtcaggagtttgagaccagcctgaccaacatgaagaaaccccatctctactaaaaatagaaaattagccaggcgtggtggtgcatgcctgtaatcccagctactcgggaagctgaggaaggagaatcacttgaacctgggaggtggaggttccagtgagccgaaactgcaccattgcactccagcctggacaacaagaatgaaactgtctcaaaaaatatatataatatatatatataatatatataatattatatatattatatactatatataatatataatatatataatatatactatatatattatatataatataatacatatttaatttgaattaatttgaagtgtttcttttcacattttttttttttttttttagacagggtctcactctgttgcctagagtgcagcagtgcaatcacagctcactgcagcttcgacctcctaggctcaagtgatcctctcagctcagcctctcatgtagctgagactacggtatgcgccaccactcctggctactttttttgtagacgtgacatatccctatgttgcccaggctggtcttgaactgatcctcctgcctcagcctcccaaagtgttgggattacaggcgtgaacaccgtgcctggcctgtttttacttttttaaatgtgactattagaacatttaacagtacattggccgggtgcggtgcttcacgcctgtaatcccagcactttgggaggccgaggcaggcggatcatgaggtcaagagatggagaccattctggccaacatggtgaaaccccgtctctactaaaagtacaaaaataagcagggcgtggcagtgctcgcctgtagtcccagctactcagaaggctgaggcaggagaattgcttgaacccaggaggcagaggttgcagtgagccgagatcacaccactgcactccagcctggcgacagagcgagactccgtctcaaaaaaaaaaaccaaaaacagtacattggcctggcatggtggctcatgcctgtaatcccagcattttgggaggccaaggtgggtggatcacctgaggttgggagttcgagaccagcctgaccaatatggagaaaccccatctctatgaaaaatacaaaattagccgggcatggtggcgtatgcctgtaatcccagctactcgggaggttgaggaaggagaattacttgaacccaggaggcagaggtgcggtgagtggagattgcgccattgcactccagcctgggcaacaagagcgaaactccgtcgtcaacaacaacaacaacaacaacaacaacaacaacagaacatttaacagtacatatatgggctgggtgcaggggctcattcctgtaatctcaacactttgggagactgaggtgggaggatcacttgaggccaggaatttgaaaccagtccgggcaacatagtgagagccccatctctacaaaaaatacaaacaaataaacaagcaaaaaatcccccaaaactagccaggtgctcaggaggctaaggtgagaggattgttcgagcccaggaggttgaggctgtaataagctatgattgtgccgctgcactgcagcctgggccacagacggagaccttgtctcttaaacaaattagtttaaaaaaatttttttaagtgtatatgtggcttacagtatatttctagtgggcagggctccccagataacaatagcccctcagccctgtccagtgttttgtataatctcttttaaaaactctgagaccagtggggtaggggccacctgcctctattttacagacagggaaggtgagactctatgaggtcagatgacttggtcaaggtcatatagccaggaaggggtggaggcccaggttttcctgactctagatctgagacaatccagagagatgtccctgcttccccatgggcattgacccacactggatcactcactacacccagcccctcctgcagccactgcccccttcccacactccaggaatcttccactagaaacagccccctgacaaatcccattaagacaaatgcctcttgggcctctgttgaagccgaagtctgatttgagttagactctggcctacgattccccgtcaaagctgctgccttcaccctgcaactaaagccatggctcctttgtacctgctgccactcacatacatcagggtagaagaagcaatggccactgctccctgggacatgcccatttctctcccacccatactcctccacctgggttccgccttatctagctactccttgaagatgggcatattcagtgattctaggggactgtttctttaatttcccccccgtctgtccctggaacgtgataaaaatacccagcattgatctttttttcttccctttctgccaggataatgtttacccaggtgtcaatcaggagaagaatttggcttcctaatttctcttctcctccctgggggccgcacatctccctgcctcgcatggacactgagctggaatcaaggttactaataatcccccagcacacacagacaccgaaagcacatatattaaagtcacatattgatttatattttcgggtccctctgcctttctgcccagcctcagcctttctctttgccaaggagaaaaaagaattacacagccatatttttcgccaagatgtttagtgtaaagagcattgtgtctgaaggtaattcccgctctcccaccctctttgcgggtattttaaaaaaatagtgtggcattgcctatccatatgcatttatctttttgctgttcgttgtttcaattttccctgagggtaccaaagagagatttaaggtagactgtcagaaggtcttcctggcttgacaaatggtgggctgccatctccaaagaggctggttgtttcgccagcagagataatcctattgcaggtaggggtggagtgggtaagagtgagtgtagaaggcagggcaatggattcagcagcctctagaggtcaccccaggctgggtgtggtgactcatgcctgcaatcccagcattttgggaggtcgaggcgggagcatcacttgaggccaggagtttgaaaccagcctgggcaacatggtaagaccctgtctctaaaaaaaaaaaaaaaagaaaaaaattagccacgcatggtggtgcacatctgtaatcctagctattcgggagagtcacctgggcctagaagttcaaggttacagtgagctatgatggctctgctgcactctcatttgggctagagtgaaaccctgtctctaaaaaaattaaaaaaataataaaaggccgggcacagtggctcacacctgtaatcccagcattttgggaggtcaaggcgggcagatcacgaggtcaggagatcaagactatcttggccaacatggtgaaaccccgtttctactaaaatacaaaaaattagccgggcgtggtggcgcacacctgtagtcccagctattctggaggctgaggcaggggaatcgcttgaacccaggaggcagaggttgcagtgagccgagatcgcaccactgcactccagcctggtgacagggcaagactctgcctcaaaataaatacataaataaataaataataataaaagagattacccaccagttcaaatagcacctcataattactggctgtggtcccatttcacagatgggaaaatcaaggagtgagtttgcttcccattggcagggaactgaggctctggattccatatcaaccttgcctttccacctggattcaggatttgatgggaaaataactttcctccaggtggggctgactcttgcactgagaccctgggggcgggacagctggggggtagtgctggcagaggaggagcctcattctttaaaaagggctctcaaagcactaagcctgaggctcacagtcttcccctaacctctcctcccacccagaggccctgtcactctggcagagcagacagttaaaaatgccaggctaggcatttgactccagttccctcaggggctcttgggatgggagcagtgttgagcatgggaaaggagactcccacacaaacttggccccatcttcttcatgctggttgtgagtttcctcccctctcccatacttcatttgctcctcacaaatgctctgggaggtagagggtgtcagccgcattttacacatgggaaaattgaagttaagtacttgactagcaacatgtagccaggagaaggcaaagcctcaactacagcccagctgtcctgattcccccctgccacaaggctggcctcctggtactcagcttggcaagggtcaggagcccttggtgacctttttcagatccctccggcctccttgcctggctgtggccttgggatcatggctctctcattctccacccctggtactggaaaagcggcttctcttttggttgtgcccagatgcacttgggctgggggtcaggactttccctgatggagcttgaccagggtcctggggcctgtccagcccctgccagagactctggggatgctggctgtctgctgctttccctttggtatttttcagtggcttggttgagtcgcctcgaactcactgtctctcatttcattctagagcctgttttaacccctagcagggtgagaactaatatctgtggaaagtcactgtgtgccagccctgggcagggtgctgtccctccatgctgttgaccccacaaggtgaaggttgagcccccatgttatgggggactccgaggctcagggagcataagtaacttccccaaggtcacccagcgggtaaggggagttcctatgacggggcctggtcttcctgaccccaagtccttgctttgagctcgctccacccatctgctgtctccgtcagacaagccaggtgggggcaggggccagacagcgcagggcgcggcgggaatcagcaacaaggaccctcccggggaacttttcccattgaaaatctgttccctcgcggccacgggtgatgtctggctggagctgatgaaaaacgtgcagtgtaatggaggagggcggcgagggcggcgagggcggcgcgggcggcccgggcgggggcagcgtggcattgagattctgcggggcgcggggggcggcgagggccctgacactggccgggtaattgatctggaggtgccaatttgcagcaactaaatatttggtttctgcctttgcccgctccgcgctctgctcaaacaaacttcaattaaaagcgaaaagcgaggggtggggaggcggctcacccgggtccctgcggcccgatcgatggcgcggagcccgcgggctggcgagcgcggcgcgccgggcggggacacggcggacgtgggccgggcgggcgccctcttccggatcgccgagcaccgggcgcccggcccgcgggaggcagcgcccgagggtgggatggcggaggcggtgctaggagcccgggagccgcggctttagctcagctcagctgagcggaggggtggccaccgtgtgccaagcgggggtcacacacagggccaaccccaacacctccaccgcggagtgtgagcctgtgtactaggctagaaaacccggggaaggagacgtcgcggggcgctgaccctgttctccctatgcacctctccaaacaaactttgaagatgaccttgttgttcggtgcaatcactcaggtctttcctgagcgccactgggtgctgggtgcactgggctccaaagccagtctcctcttccatgtctgtccacccctttactcttgggttggcaaaagagctgccagtgaatccatcccaggacccaaccttggaggggtctgaaggggagggcttggaattgggagaagagtagtgagatcctgggggtttggagaggggtcctgggaggtggccacagcttggagcagaggaggagatcattgggtcacagttgccttttttggggttcaagacaaacagcaacaatagtcattcactgggtgaagttagcccacagggaagtttctcttcctcaagaatcttccagtcctttgagggtagaggggaagggctgggaagaagagctcaccactgtgcgacaggcagagcatctctggtcagccgggtagggcagcctggggcacaggaacagttctgggagagatgtgatgggaggaggtggggctggcaaagaggcatccaggtcggcatagaaggcagaggtagattcagatccaaggaaagaggaggggagctggggtcctttcatctgagtgaaattttcttgagggccagaggcaggagctgaggcagaggagctaggaaggtgagggagggggcccttggcctttcccacatttctgtgccccaccttccagggtggaagacttactccttcaccagatgaggctgctgctagttcactcagctgtgggctgtggcccctttccttcccgctccctgtcgaccccttcccctgtcctcctaggtaccccgtggcccacagcgggctgttagagcacaggtcttgcttgtgtggaccctagcctccaggccctcagatgcccactccttggtgcatagggctctgggagagggtggtcctgctatctcggcttctatcccttttgacactaagatgcctcgcttgccggaccctcaaccacactcaactcccagctctgtctctcttagtggcttggggcaccaatctccccatcacacagaagttggatccagagctccgcatgaggctgaggatgagcctagggctggcctgcccctaggagcctcccccaccccccacccctcaggggtggggggctgcagcactcccagccttctgcctgaagcccgttcccagcctgtaagctgggcgcctgctcccttgaattccctccctccctctcccttcctgagcgctgagctgtggagcagaatgatttcctgtaattggccagcaatccggccgcccgacttgttctatcgacatgctggttagctggaaattgtattggaatctaagtgactgggagcggaggggaaggtggggagcaaagagaggcggtttgggtcccagctgggtgcagcctcagctctgcaggtgggatgaggaaccaccagccacgtctctcctggaaggagcaggaaagcaacctatagcaccacatcacctccttccttttgctccttctctcccaccatgtccgggggtctccctgcccactcctatatgaccccatggcctgaagtcatcactgccatcgcattccccctcctgctctgagactgtttccttctgacctaaagtgccttggtgagaactaggggcgctcagcagcgcgcctatcctgctcccattcaatttctagccatggaggctcatcatggaaggtcctaaacctttccctgcctctgccctgccccccatgaggagagagagagaatgaacatttgaagaagagttgtcaattactaaagagccaaagtgtataatgggggcagtgcagatagccggaggagcactgtactgggagtcaagaagcttggtggttatacctgttggctacttaggccccttggctcaacctctgagcctctgtaaaattctggacctgtctgcctcacacagctgggagatttcaaggggataactggaacgtgctttgtaaactgtgaaactgcgaatgaccttcgggccagtcgggcctgggggtgggggtgttttagaggcctgcctgcgcccttcgtcccccgcccagaaggcgtgtgcgtcttcaccctcgctggtgtcttattgctccgctccgggtgctaaggcccaaagtgagggaacggaacgcggaggctgcagggtcccgtcgccgtcgcggtgggtgggcaggggacacgccctttggcacccagggcccgcagcccaggctcagaggacgtgggcgaacaacgcaccttttgagttagcgctcagggtcaggcagagcctccgcgcccacctggcccgtgctcccgcggcagctgctcggcaggagtctgaggccgcccgcggcctgggaggaggaagattaggccgctcggcgagcgcccgccgcggaggcccggcccagcccgggagggtgctgccacctgccggccgaacggcaggccgccggctcgggcgcgggcctgggtcccggaggcccgacctctgcagttgctgagcggcctcaacttcaagtccccttcggagaaagtagtccttcttttaaggccgccttggacccccaaggccgggaaggggatcctggggcagggaggcaagaggagctggagagggagctctggcgaggcccgggcagggcagggctgaattcgaggtttctccacacctgccatgctctgacattcctgcttcaaacccagctcactgggtcagggaaggttaattctctggaactttacagtttgctaagggttttcagtgtcctccactatgaagcctaacgatgtatgagtagaaactaaaggcaggaggtcacatggcaagcggagccggaatgcgagcccaaggcccaaccccaggctccagctcctcctgacaagaggctcagggcacaggagagagttcagaagcctggctctgcaacctggaccaaatccatctttctgagcctgggatggaaataatcagtgttatgttaactatagggtcttacacatccagcagtgcctggcatgctgccgatactaggaagtgccatttcctcaattattggggtgatagggcactgtgggggtccataccttccctctcctttctccgtcctggcggatcgcaccaaaccgaggaagtggcaggctcctgccaccctcatcctgcctggccacccacctggcagcccaccactgccttacccggcccttctttgccccttaggggtttgcagcaagttaatgagctagactcagcacaagcggctctgggaaagggggcactaagtatggccaccacagcatttgcatccgtcacactcatttctagccttaataggcttctggctgcaggatcaacacatcagcaagtctgcaggccctggcagggaaggcttatgtctgcgctggtctaattgggttggggaaggcagatggggaggcggggcaagaaggtgtgacgctgcctcagccctctacccacctcccacaaaggtgcctcgggcctggctgcagtcctcctgggacccagggagaagcctgatggcaagtgcaccttctggggccctcacctccccctgagctccgggaggactccagcccagtgtgggaagaagccaagtctgggaatcttggttggtctggggcatttcagatcaacacactttattaaacaccaacagcgggccaggctctgcactaagaacacagagatgaataagacactgtccctgtccctagagggcttacagtctagtaggaaaaaccaggcaagtttcggctaattactgtactgttggattaaggtaaaatgttgagggggagttggtatcctagaccacctaacccagcctggggctttagacagtgcctgaactgagagctagttgtaggttaaaaaaaaaaaaaaaaaaaaaaaggaagaagaaataaaagaaaataaaaggtatcccaggccaggagcagcaggttgaaggcacagaggcaagaaacagcaaggatggtgtacacggaataccaagaggtccaggcgagaagcaggggtggcaggcaataagcaggatgtgggagcactacacaaaccctacgtggggagaggggtctcccagaagaggctggtcctgcctggctacagcgttacccacgagagaatccttgctgcttgctggcagcaagccatactggggggcctgggccttcagtataaaaaatatctcaacctaggggagggccttgttgactgtttgaacatggaaacccttggtccaacatgatttcccgtggtccactgaggaggtttaggccacaatggggtaggtgcttagagaggattcaagcccagtgaacccttggcctcccagctctgaggagggccacagagccagtattccctacccccacccacagaaatgtatagcagtctctgactgttgctttcacacaccatcacggttgctgttctgtaggtgctgctcagggaaggtgggaaggacagcaggctatttcttgatctcaaataggatacactccaaagacgggatggcctggcacagaggcccagccctgattcggagagtccgtgtgtgtgtgtgtgtgtgtgtgtgtgtgtgtgtgtgtgtgtgtgtgtgtgtggggagggggctgagaggaaacaggatgtgttacctggcttcagcctccaaggagatagatggaggcctggggctccctgccttgagtgccccactaggcgtaaggcagaaggtagtgggtgagcaggtagaggaggctggcaatggcagcgagccctgtgaggaccccaaacctcagcggcaggtactccagggagcgctccagctcagtgtgcaagaggatgacctggcgtttggtgacactccactcgcccgagttgtctaggacatggcgggccatgcgggccttgtctgtcaggggcagctgggcattgatgcgggcctctgcgtccttgcggttcaggctgttccgccgcatcagccgtgccagctgtgtgtcccggtcgctaaggatagggcaaaagggcactgtaggtcctgcctccctctcaccccaagttacagggataggcagccctgccaggcccagcctgaaacagagagcatggggactggatcttccctccaaccctaccctgctctgggctacttagggtcccacagccagggagggaggcttggaagctcactggctgcctcacaccccactccactcactgtgaggaacccagagctctatgggctacggaagccccttaatacaaacaaggggggaactttggccacagctcttttttttttttttttttttgccatctggggtctctttgctttgctactagacctgacattccccagtcataaggtgggaagatttcatcacctggaaccagctacatcctggatccctggatgggtgacctttactgaaaggcctatgcctatgagctagacgcttcctgcagttcccctgggggcctgggtcttcagtatcaaaaatacctccttgggccatcacagagaccccctctccttgctgctatacccctcccctgaacatttagagtaaaaggattgtgctaagatggtatctcttgtgcttaatgccactgatgatgtgggacagacaagcccaaggtgcttcaaagaggatcaaggacatgagaattggtcccccttagttgtgggacaggattcagcactgcagattaggtcggacaatatcaagtctcccaactccaagagaaattcaaagaatacctccttcacccaccctgaggtcaccatctgggtccttcctcaggaaactccctctcttgccttgggctacagtcagtcctctggagcggggttacctctaacacccctctagctctaagagctacttcagcccctcagtgaggacaagagcacaaggggttgcagcagctgttttctaccatttggggtctttctgccttgtcacgaggcctgagttttcccagttataaaatggaagggtttgatcactacattttggttccttcttttttttttttttttttttttttcctgagacagtctcactctgtcgcccaggctggagtgcagtggcgtgatcttggctcactgcaacctctatcctccaggttcaaatgattctcctgcctcagcctcctgagtagctgggattactggcatgcgccactaagctcagctaatttttgtattttttttttttttgagacggagtctcgcttgcccaggctggagtgcagtggcacaatctctgctcactgtagcctctgtctcttgggatcaagaggtcttcctgcctcagcctcccaagtagctgggattacaggcgtgcaacaccatgcccagctaatttttgtatttttagtagagacgggatttcaccatgttggccaggctggtcttgaactcctgacctcaggtgatccacccgccttggcctcccaaagtgctgggattacaggcataagccaccgcgcctggactttttttttttttttttttctttttttgagatggagtcttgctctttcacctaggctggagcgcagtggtgcgatctcggctcactgcaacctccgcctcccaggttcacgccattctcctgcctcagcctcccgagtaactgggactataggcgcccgccaccacacctggctaattttttgatttttagtagagatggggtttcaccatgttagccaggatggtctcgatctcctgaccttgtgatctgcctgcctcggcctcccaaagtgctggattacaggtgtgagccaccgcgcctggcttttttatttttaaataaatatagagacgaggtcttgctgtgttgcctacactggtctcaaactcctgggcttaagtgatcctcccaccttggcagtttggtcccttcttagggattctgggaagcagaccaagtgaggccaaaaacaaatgcagccacttgccatgaaaatgaattatacgagctatagatttcctctgttacggggtcagtgtactgtggccattgtggggccaatacccacctcgctgagaacaaggactaaatccagccttcatcagggagaccacatatctgtgggtgggagaatctagtgtgagattagagatggcctggggctcccagtaggtgcacatcctcctgaaggtgtggcccagaccacagagcctcctggatgtggggcagcacctccgacagcccttcctggggctcagaaatggtcctattctagttagtctaagacttggtacaatttgttgtaataggatttttacccacttattccacaattgacaaatttttcaaaaacatgaaattggctgggcacagtggctcatgcctataatcccagcactttagtaggccgaggaggaggatcattgagcccaggagcttgagaccagcctgggccacacagcaagacccaatctctacaaaaaataaaaaaattagtcagatgtgatgctgcatgcctgcaatcccagctactcaagaggctgaggtggaagactgcttgagcccaggagtttgaggctatagttagctgtgattgtgccactgcactctagcctgagccctgtctcaaaaaaaagaaaccagcatgaaatcatgttttggtataatcacacttcaggagatgtcctaagtaatttcaaatgcaccaggggtagtctttcagttaaagaaatccacaagggagtccttatttttgtaaagcctagatccctttggtgaaaagcatcaccacctctctggcatctctcaagagttatacacccacacccactgaaagcagggcatgagtggcacccaggactctggcaaaggctcctctggccggtgagtggggctgaaggtctcctggagagcacacacaatcaacaaagccccactcacccaccaaaacccatggccacctctgctctcggcaaacagaccaacctcaaagaacagcacaggaagggccgggcgcagtggctcatgcctgtaatcccagcactttgggaggccgagacaggtagatcacaaggtcaggagttcaagaccagcctgaccaacatggtgaaaccctgtctctactaaaaatacaaaacttagccgggcatggtggcgtgcgcctgtaatcccagctaatcaggaggctgaggcaggagaatcacttgaacctgggaggcagaggttgcagtgagctgagatcgcgccactgtactccaccttgggtgacagagtgagactccatctcaatttaaaaaaaaaaaaaaaaagcaaagcacaggaaggacaaatggccagaggtgggcgcggggtcatctggtgaatgcacatgcaggtgtcggcccctgctgtcttctcatctacactctaagatcctttttttttttttgagatggagtctcgctctgtcgcccaggctggagtgcagtggtgcgatctcagctcactccaagctccgcctcccaggttcacaccattctcctgtctcagcctcccgagtagctgggactacaggcgcccaccatgatgcccagctaattttttttgtatttttagtagagacagggtttaaccgtgttagccaggatggtcgcgatcttctgacctcatgatccgcccacctcggcctcccaaagtgctgggattacaggtatgagccaccacacccggcctttttttttttttttttgagacggagtttcattcttgttgcccaggctggagtgcaatggtacgatcttggctcattgcaacctctgcctcctgggttcaagtgattctcctgcctcagcctcccaagtagctgggattacaggcatgcaccaccatgcctggctaatttttgtatttttagtagagatggggtttctccatgttggtcatgccgctctcgaactcctgacctcaggtgatccacctgcctcggcctcccaaagtgctgggattataggcatgagccactgcacccagccttttttttgagatggagttttgctcactcttgtcgcccaggctggagtgcaatggtgcaatctctgctcactgcaacttccacctcctgggttcaagcgattctctggcctcagcctcccaagcggctgagattacaggtgcccgccacaacaccgggctagtttttatatttttagtagagatggggtttcaccatgttggccaggctggtctcgaactcctgacctcaggtaatccacccacctcggcctcccaaagtgctgggattacaggcgtgagccactgcacccggcctctaagatcctttaaaaaaaatgtttttatccctaaatacaaagctccaatcgtgctactaaggcaaagagaattccaggtcttcgtggggtttgcctgaccttagttagcctctcaaacagggaatgaagaacccaaagaggctgcaggtttactcacataaggcagcacggcccagtgcaggagctgagaggatgcctgcgtccctgcattgggctcaagggattcagactgggctttcaacgacagcccatggggacccagggggaaaggcagggggattttcagggcactgagcaccacaggctccgcctccagcgtgctgggagcctccaatgccttaggcccttgagggccaacctatgcccaaaataccagcagagccaagtgcccacctatgtgtctgctgtacttgtgggtggcatccgggaagcttctgggtagcagagataccctgcggactcatctactttcaccccactgggacagggactcattttccccccacaggttgatcctcctgtttgtcaaacctggattctggttggctccgtgtcctggggaattctgagaacaaagtgccttccttagctgggctgacagtcccttccacgaaaccttctgttcgtaacaggtgttgccaaagggtgaccctggacacattctgtaactgccccctctttaattttatcttcagtaataggaatatcaacacctgtcctgaccacctcccactgagaggtaaactgtgcaaagtaataaaggtgctacaggaggaagaaggagccactgagtaacagtggcccagggcgaggccaggcatctgggctgaagtgcctgcaatggtcagcgggggagcgctccccaaacactagagaagcccgcgggctgtcccttcccacacctgcccccaggactatccgcgtcaggcacaaaggttggtttctacagaccctgagcactgctgcccaaacccccatgcctcttggccgccccgtggggaaagggcaaagtgcaaaatgatgtgggctgtttcccagatacccccatggtcctcccttccagccagggcatgctacacactcaccagtatactaccacggtgtgcttcatgtacttgagcaacttcttggtctcaaacagcagggggatatccagaatcacgtagcggtatcctggggagaggttggaaatcccccaagttcaattctgcaagcgcacactgaggactgatgatatgctgggccccaccgtccagagcgcccagcagaggggcaggccttccaaggacacacataccctgcacactggccggttccaatgccgtgcagaacagaaggctgcagaaaattatttctggatagctgatcagggaagaccttgtagaagggctggcacttgtgctggccttgaaaagtggggggcaggtcttttgatacttgaaaatgagaaggtgaaggtgaggattccacgaatgagaaccaccacagcacagggagagggaggctctactgtgcgggctgaagcagaggcctcaggccgtgtgaggcaaggaggtgatcagggcaggcactaagggtttagttcaccttgatcttaaatctcaagttgttatttctcagaaacaaacaaacaaacaaacaaaacacccaaaagataggttctccccaaagagccaggtgcaggcccagccctgctgacaagagccaaggtgggctgtctctaccaactctccatgagaggctcacgttggggcggcagcagcagaaagaagctgcttctcccatcagaggcagacctacagccagggtaaggcctggatctggagtcagagcgggcagttatgcctaaaactgtattacactcctgcagtgtaaaaggcactggctggacctcccaccacaagccaaggccagtcaagggcagcacccccacccactgtgagtgagcacatccgtaggctgctgtgggctacacgctcctcgttctttttaggtcagtgacccctgtgcatgtgtacaaagctgggagggctccaggagagcaagaagggtaagagataggaaaatgcttctctgcccagagacccctggcctggctggggcaggagactgcacccctggagcatcccactccaaacacttccaagcacagaaccagacacacatcacaccaattccaagggtgtcacgggaaacttgcactcaaagtgatgcagggacaatggcggtgggggggtggcaatctcagctgcttggtttcctgttccccaagacctgctgctcaggaagcccaagagaagcccacagttgaacaagggggttaaaaccataggctctgatgacacaccttggttggtagcccccccaccttccccaccatgtgaccttgggcccccttttgtgtaaacctcatctgtgtaaatgagtaaaaagaatacctacttcacaggatgatggtaaagatgaaatgagccttgaaaatatgtgaaccatgcagtactactccttcaccagtccctcgctaggtgccccaaaatgatagttactgttgcagggggaggccaacagtgtggtgcgcctccctaacttggagcagaagccaagactagatcctctccgggcctcttatctccctttcctgttcagctcccatcacttcctctccccttgctgtcctttctccggcccctctggggagtacgtggtcagctatttggttcaccagcaaagggctattcagctgtcacatccctcctgtctgataagctctgcaaaccatcctgactctattaagacatccgtctgcctacacagagaagtccccaacagctggtgatcttatctgacgtttgattataccaactttgacagttgtatttgttatactcatcagggaaaaactgggactgtggaagccacagctgtcgtcctcatttttcaccttatcgagctcaaaagggctctctggcttttatttaagtggtggtggttggggaggcgggaggctgggtggatgacacagtgaaagagctttggagctggtgacattatccgatgtttaatttcagaaggggagagccactgccgcctcgaagccctgcagatataccagtaactggcatgggagagaatgcagaaagggcaggaatgaaaggcagatgacttcactctgggtgggggacgggaaggacactggcacaacataggaggcagcacaaagagtccagagggaggactcttcttgagggaggcagggaggaggcctgcggcatggtgctgagatggagcgcacacgctggttcagcagagaagatgcgggagccagctccagcccggacgggagggggttggggtcagcatcatggatgtctgtcgagtcatccctcttttggagggaggtattggccacagggggatgagggtggggggaggttgctcactcaaggcatgacagaataaggggcttggccatggtcacagtgtaaaaggctcccccagccaggcacagtggctcacgcttgtattcccagcactttgggagggcgaggcaggcatatcatgaggtcaggagtttgagaccagcctggccaatatagtgaaacccgatctctactaaaaatacaaaagttagccaggtttggtggcatgttcctgtagtcccagctactcgggaggctgagggcagaagaatcgcttgaacccgggaagggaggttgcagtgagccgagatcgctccactgcactccagcctggtgacagagcgagactccatctcaaaaaaaaaaaaaggctcccctataccctcgtggaaggagagtctcagtgtagtgactgagagtggggtgacaggcaaccaggccttcaactcggaggcccaggctggaggccacatgtgccaaaggctggcatgcaaatctccagcagccctaggccagcctcttgccagatcccaagccaccgccctctgttctccctcccacttctggtgactgaccccaacctgtaaagtaagcatcaggccacccctgtgcaatgctgtcctgaagaacatggcttaggccaggtgtggtggctcatgcctgtaatcccagcactttgggaggacaaggtgggaggattgcttgaggccaggagtttgagaccactttggccagcatagtgagaccccatctctaaaaataaaataaaataaaataaaataaaaaagaacagggcttgaaccatggcatatagcttggaagaaggttcttgccaactggccccaggcctctgatttcaaatactccccttcccctacccaccctggccatcttggtcccttcccaatttccagtctacaaacttgctttcccaaatggctcagccagaaccaaacctgcccctgactgcagtttacatgtgtgattaactgacagtcactgacctggaccctcagtcttcctaacatgctcacgttggattttttcttttttttgagacggagtcttgctctgttgcccagacagtctgagtatagggtgcaatctcggttcactgcaacctccacctcccaggttaaagcgattctcccgtctcagcctcccgagtagctgggattacaggtgcacaccaccatgcccagctaatttttgtatttttagtagggacggggtttcaccatgttggccaggctggtctcaaactcctgacctcaagtgatctgcctgcctcggcctcccaaagtgctgggattacaggcatgagccactgtgcccagcctcatgttggattattatccccactgcacaaatgaaaaaatgagctgagggcgagatcactcaatgaagtcacacagctagaaagtcagggttgggatttgaactcagatctatggctccattattcaccagctcttattactcccatccctactagaaaaaccaacttacttcctgggctcatggctcgaaagcctcatgtgtctcttctcattaaactgtcagcctccttaagagctgagggaacgtgcttctttcctctggggctggtacggggctctgtgtggaggggatgccagtaagcagtatgaactcatcagctgggataaccagctcccctaccctggccaaactttctgcagaggagaagggccctggccctggaaggaggccccgccccccgccccaggccctggcacttaccccggaggaagtacttgaacgtctccttcatcatctccttgcgaatctcggggtgggtgatggcgttgagcagctgccgccggtcaggctggttaaagatcaggtcccccaggaccttgcgatttatgtcgccgttctccagcaagacctcagtgccgaagacctctacgatgcgccggtgggcagggtatcctggctgcacgactgtggcaggaggaagaagctgggtcactccctgaagcctcagggccagtcagaggacctcagtgaccaggggcaaaatgatgggggaactcgggtgcttctttcaggtggagcaaaagcaaaatgagggtagagaaagcagtgaaggaaaagagcagagtgtacaggatcccttgtgctggtaatggggtacagctggggggtttctaaaaacagaaaatagaagagcagagaaggcaagcacggggcagagacagaagtcagaccagggtcaacaggagccttcccctcctctgagacttataaaaaaaggaggcatggcagaaggccggaagcgtggggagctgctgtgcacggccccccaacctgcccctccaactcaccgtgccgggccatcacgtccacgtcaatcaccgcacagcccagctgctggaacacctggatcactgagctcttgcctgaggcaatgccccctgtcaggcccaccagaaacatcttccaggaaagagagctgtccgcgagactacggagccaggagctacagaatcactggagagcagggcaagtgtggccgatgggggcggtccaccagaggagtgccagaaggacctgcttgggagaggccagcgggactgatcagtttgggccaaaataattgggagagaggaggcaaaggaagtaaagggagacagcttggctggggagggacatgtcctgagcttggggtgctctggggccatctggagaggagaaaccctccaggaaaggcctccagtattttaaaaacactcgcaaagaaggcaaatgtggccaggagtggtggctcacacctgtaatcccagcactttgggaggccaaggtgggtggatcacctgaggtcaggagtttgagaccagcctggccaacatggtggaaccccatctctactaaaaatacaaaaattagctgggcgtggtggcgtgcacctagaattccagttactcagaaggctgtggcaggaggatcgcttgaacctgggaggtggaggttgcggtaagctgagatcccaccactgcactgcagccgtgggtgacagaaccagattccttctaaaaaaaaaaaaaaaaaaaaaagcaaacgaacactataaattcagcaatcaaaagctgaacaggcagggcaaggtcaggtgctgttaggcagcatgcttcctggacgaggcaggatccccttggaggccaacttcctagaggaaggagacacctgtctctctgtggtagacccacagcactcttcagatgcccactggtccccctggcctttactttctagtctaggagactgaggctcaaaggaaagaaatggcctgcctgcagccatccacggaagatgcaaaagagaccacaaatagagtccaggtgcctgggccctcttttgccccaaggcctcctccccacagaaggtcccatggatcacttccccttgaacgccagcactaggactgcctgggtagctgatatagatggagacgcacaatcctcttggcccagatggggaactgagccgcaagcagtggctcggcagccactaaggccgaggtttagaaaagtaccactcttgccaagaaggaatgtgagggaaaggccaggaggctgggcgatgctggtggtgtgactttgagctggcgtcgtggtttgtggcgtcctcagaccaagcagcggcagcacggcacaaaggttggggcatggcttcttcacacccagctcctccactcacatgtgctgcaaccccgggcaagccgcttgcctccctgaacctcagttttctcatccataaaatgaggtttaggatcataagactgccttggctgggcgtagtggctcacgcctgtaatcccagcactttgggaggccgaggcaggcagatcatgaggtgaggagatcgagaccatcctggctaacatggtaaaaccccgtctctactaaaaatacaaaaaattagccaggcctggtggcgggcgcctgcagtcccagctactcgggaggctgaggcaggagaatcgcttgaacccaggaggcggaggttgcagtgagcggagattgcgcccctgcaccccagcctgggtgacagagcgagactccgtctcagagaaaaaaaaaaagaaaaagaaaatgcatctgcagtccatggtatgttgcttgataaatggtaaatatcccaaaaatggaagtgaggatagtgatacagggtgaaaagtaggagttacagttccactgcaaggcatagaaaggaaaaaaaaaaagactttcatgaaatcatgtccctattcctccaacctcagactatcacaccataaacttttaaggagtcatggtgcattttctggagtaaatgaggttaccatgtcttggactttgttcccaggctggaagcaattaaatcaaaggccaggtctctcccacccttccttcagcctcaaatcacttctccaggactgtaaaatctgccataggactttttttgttgccgttaagcagcagatttactgtcctaattacactttgcttgagcttacactgaaatgagtttgcctcccgtgaggacacaccaaatgacaggggaggcagctgcttggatgtggctgagttggtgcctggcttggggcagcaggggaccaacctagaaattgaaatctgccactgctcattctcaccccggaaagccagaggtggagagaggaaactatccaccacggagtcatcatccaaatggagagacctagctacattaatcaactatttaacaatcatttctaggccacgcacggtgttcacgcctgtaatcccagtgctttgggaggttgaggcaggaggattgcttgagaccaggagttcgaggccagcctgggcaatacagcaaggctctctctctattaaaaaaaataataatttctcctccatctctctgaggctggtgatctccctctaggtcacaaaaaggacagggttcagttgtaaaaacaaacaaacaaaacaaacaaacaaaatgtcagccactcagctgaagctttgaaatagaaaatctagaaagaatttttttttttttagatggaatttcactcttgtcgttgcccaggctggagtgcaatggcgcatctcagctcactgcaacctccgcctctcaggttcaagcgattctcctgcctcagactcccaagtagttgggattacatgcagccgtcaccatgcccagctaatttttgtatttttagtagacatggggttttgccaggttggccatggctggtctcgaactcctgacctcaggtgatccacccacctcagcctcccaaagtactgggattacaggcgtaaaccaccacgccaagcttcaagagctttttttttttttttttgagacagagtctcactctgttgcccaggctggagtgcagtggtgtgatctcggctcactgcaagctctgcctcccgggttcacgccattctcctgcctcaaactcccgaatagctgggattacaggtgcccaccaccatgcctggctaatttttttgtatttttagtagagatggggtttcaccatgttggtcaggctggtctcaaactcctgacttcaggtgatccacccacctcggcctcccaaagtgctgggattacaggcgtgagccaccatgcctggcctttttttcttttcttttcttttcttgagacaagagtctctctctgtcccccagggtggcgtgcagcggtgcaatctgggcccactgcaatctctgcctcctgggttcaagagattgtcctgcctcagcctcccgagtagctaggattacaggtatgcaccaccatgcctggctgatttttttgtatttttagtagagacgaggtttcaccatgttggccaggctggctcaaactcctgacctcaggtgatctgcccacccaggcagttctgatgtgtaacagcgctcaggataaattctaactcttcttttacagcagtggagactgaggaccagagaagggaggggacttcccaccagcagctattatcaaaggctggatgcagttcagggctcctaacccctagtctagacccctgcctttaatgtactcaaggaatgaaaaattaatttacctttagactaatgagacaaagtaaggaagatgaatctgtttgtaggcaaatcgattcagagccaaagagaaataatttcttgattatcatactgttttcttcctgcagaatgggggctgagggggtgtgtggacaatggccagagcacagatggaaattccagcctcccgggttacctaatgagtatcctcccttctcagtgccttgaccgagtgtctgtggaaacagaccaacagctgcttggcctccatcaggaaggccaagcggacaaaggagcacacgcccagggaggctccgggtccccaacttaaaagggccttgacaaataacagctgttcctgtccaacaagcccctctgtagctcattccttcactgaccatccactgagcatctctgtgctctgcaggaacggtgccagggacctcttgggtaaccagaggaaaacacaagtcttgccccttgggaaaactggagagctagatagtaccagatgaaaacatctgagaacagagcgctgacaggtaagcaggaatggtcaggtggtgctggccctgggcctgctgtatgagtgccttcccactcacttggctgcgcacagatctactgggatctgccagggaggaagttgcagcccacggtgctcccaaagctcagcaaggaggaaatagaggcttaggtacccagcggcctccaagtcacacctagacctgccagcagctccctgtcaggcccacatgaacaaacgaccacctttgatcacctgtgttcatgaccctctttctgctctggtcaagtcatcattctccagaatccgatctggcttcccacattccactgccgcttacacagaggcagtacattcctcacagcaagtgctaaacctggctataatctgaatttactgcgaaacttacaaaaggtacagacacccaggctccatctaccccagcccactgaatctgaatcagctaggcccagaaccatggctaaaatgaaaggctgtggactggaagtggaaagtcctgggtcctggtctctgaattctgtgataaaactacccatgtgactgcaggaagtcttctctccagcctggcccagggtggtaaggactccatacaagaaacagctgagccccgggtgccttccctcctctgagcctcagtccccacacttgtgagtgagaggggctggagtttcagtgccaagaacggtgcagctccccagggaggctgagagtcacactggtgatttcttcctccccttcagtggttcagagctctcctgggagtggtgaataaatgctcccctggggccaggcgcagtggctgtaaggccaaggtgggcggatcacttgaggccaggagttcgagaccagcctggccaacatggcgaaaccccatctctactaaaaatacaaaaattagctgggcgtggtggtgcatgcctgtaatcccacctattcggaaggctgaggcaggagaattgcttgaatctgggaagcggaggttgcagtgagcagagatcatgccactctggactccagcttgggcaacaaagtgagactccatctcaaaaaaaaaaaggccgggtgtggtggctcatgcctgtaatcccagcactttgggaggccaaggcgggaggatcacctgaggtcaggagttcgagaccagcctgaccaacatggagaaacgccatttctactaaaaatacaaaattagccaggcatggtggcgcatgcctgtaatcccagctactcgggagactgaggcaggagaattgcttgaacccgggaggcggaggttgcggtgagcctagattgtgccattgcactccagcctgggcaacaagagcaagactccatctcaaaaaaaaaaaaaaaaaaaagctcccctggcaaaccaagggatgacattactgttggtggcctgggaatcttcctcctcaacaccaaaagctgttcacagaactggcttggctggaggcggaaggacaacaccaagtccacagtaacagagaaggagccaatgcactgtgcaggagaaatggaagctggattctgggaccaatcccaggtatgggattcatcagccaaggaggagccagaaagaaaagcaagcctctgatcccagggaagccacaccccatcctttctttccctcattctccatgtcagtgaaaggcagcagggtgcaaagaaaagggcaaggagtttgggttagagctggtgcctgcgctccaactctgcagtgaagctctaaggcctgtgaaatgacgatcagattctattgtgctccacaagtggtgggctcttttgcatcgggtgtctccaaattgcctctcagtttttacttcttgggcccagtagccccaagaagaataaatacattcagagaatggtctgtcttagaatctcctctggcagtgtttctcttagggaaaaattaatgggctaaataaagccctactgctctgggaggtctggccaagttctaatcccactaggcccactctgttagcctaagccaccagcacctgtgccctgaccactccagtagcctcatgacctgaccccctcgtcccggcctggcttctccccaaggtagccagggtcatggcttaaaggagtcatctgatcatgtcactcccatctaaaaccttcactgccttctcccgcctcctcctggcccttcacagaggtctccaggccctgtgtgactccctcagtcactccctgtccacgatgcctggtgcctgtcacactgatcttccttctgtccctgaacatgcgggctctttttttttttttgagacggagtctggctctgtcgcccaggctggagtgcagtggtgcgatctcggctcactgcaactccgcctcccgggttcacgccattctgctgcctcagcctcccaagcagctgaggctacaggcgcctgccatcatgcccggctaattttttgtatttttagtagagacggggtttcaccatgttagccaggatggtctcaatctcctgacctcgtgatctgcctgcctcagcctcccaaagtgctgggattacaggcgtgagccactgtgcccagccacatgcgggctcttttcgaccccaaagcctctgtgctggtgttctctctgccagactcacctcagggctaactactcttcagtcaccctgtactgactgtgtcaaccaatcagacaccaggcacgagaaggggtggtggggggagcaggggaggggtaaaacaataaactcacagtaccagtaagtgtggtggtggtaagtgggtaagggtatcaagagcaatggggggccatgcatggtggctcacgcctgcaatcgcagcactttgggaggccaaggtgggaggatcacttgagcccaggagttagaggccagcctgggcaacaaagcgagatcctgtctcttaaaaaaaaaaaaatagctgggcatgatggcatatgtctgtagtctcagctacttgagaggctgagatgggaggactgcttgagcccaggagttggaggctgcagtgagccatgactgtaccactgcactccagcctgggtgcagaataagacctgacttaaaaaaaaaagagtgacaggcacatcattgtctgacccaggacctgaagcagcatgggagcaagtcacatccccttggaggagcctcatccaatcccccaacccaaatgatgcccctgccatctctcaccactccctttactttccctcctttggactcgtcatgctttggactttcatttctgttcatgtgactttttttttcttctttgagacagggtctcactctgtcaccttcttcccttgggacagctcaggacttatgttggaggcaaattctgttccttctcatcccccattcaacagacccgcccctgcgtgtgccaggccaggacctggctccctcggcttgcagcccctgtcctcctccccttgccgcctctcaggatttcacactggggccgcctgactagccagacagaactgctttcctaagggggtgtatctgttttgcaccaatgatcaatataatcattcatgaaaacgagtcatttcctgccttgggacccaattatttctcgaggaaccagtggttgcaaaaatatattgttttccagttaactattaagtgctatttttgtatacggcttccccactcctaatctttcattattggtgagaggttgctgtttaaaccttcaagtccaagttctcttcgtgggctaggcccattaagccgccacctcctccaggctgccagttacctggagagagccacaaggaaaggagctggcgtctgcctccctctgtgtcctccctgctccctttgccaacaccaagggcagggaggggacaggtctctcttctctacttgagcactctccaagcacaaaccatcactccagctttcatgaatgagcagggaggctgtttggactggactactttgttgccatttatgcaaaaaaaggatcacagggactgcacattctcagagggttcagagtcaaagggaccttggttgggattagctctgtcccttaactagctgtatggctgtaggcaatttaattcagcatcctgagcttctctttccttgagtataaaataggatttgcgcttgaacctgggaggcagaggttgcagtgagctgagatcgcgccactgcactccagcctgggtgacagagtgagactctgtctccaaaaaaaaaaaaaagatctgtaatgactactcatggggtcgtgtcaggattaaatgaggtgacaacataggtcacagtcacctcatcttccccaactcagtgtgtgacatgtcacagccactgcagtctactccatttgtagtgtgatgggttacttaagggtgtatgtatgtccgccacttgaaccctgcaggctgggcggtaagccaaggccatggtgcccagctgaggagcacgtgtccctgagaacccaaacatcctagggcatagctgggcacataccaaggaaaatagtctcatcacacacaccggaggcaaagagccagaaaattagcttaaaggcagcctggagacgggaggcggcacggacgcccagagctgtcctgctgccactgaggagtgccctccatttaagtcctaatacgctcacctactcacgaagctggacttgtccgaatcattctttggtctctcggctccctccggatttgggggaatgtttttctatacaattctgggtttttctcataactccatttccctaaacagtacctccctcctccctccttccacttgtataggccaaaagcctcggaatcctcctggcctctctcacaccctccatccaacccgcagtgcccggccagcgctacctcccacctgcacagcccacaaggagcccccggtgcatgagcgccaccatgtcgctgcggaagccctgcagcagcctctgagccatttcctgctgcacctttgctccaaagttaggaacaaactttgtttgctcctaacaaagcagctagtgtgatcctttgaaatgcaagtcagatcatgtcaggcctctgctcacagccgtctaacagttaccatctcagtgagtacaagccaagtccatggagagtcctacagaagcctcatgaaagaggccatctatgtcctcccagcatctccaaccactcccccctacatcactgccctcaggcctgtgccccaatgtccccacagtcccagacaaggctcttccccagagggctgccccattcactcccttctctgcccaatcgtccccccatcagagactgtcaggtcctgtcccgctgaacccaacccccgtctggaactggctggaatcaccttaaaagctgtggcaagcggatgggtgcggtggctgacgcctgtaatcccaacactttcggaggctgaggcaggcgggtcacctgaggtcaggagttcgggaccagcctggccaacatagcaaaatcctgtctctactaaaaatacaaaaattagccaggtgtggtggcacgtgcctgtagtcccagctactcaggaggctgaggcaggacaatcacttgaacctagaaggcagaggttgcagtgagccgagattgtgccattgcactctagcctgggagacagagagagactccatcaataaataaataaataaataaataaataaataaataaataaataaataaaagctgtggcagaagagttcccacaagggaatgccctaaactgtctcaagacaaggctggttgggattctaaagaaagaaccactaatcgccagggtgatcagtccaaagcatttataagcattcattaggggaacttccttacagagtgggctgcaccactgctctcaatggacagcgagagaaatgaggtgttctacctaggtatgtcgacagcaagagggtcagggcatggagtttatatgaaggtttaaggaatttggctcagggccagggccagtttctttcagtattttgggcaacaacctagatacctttatctaggtatctagatatctataggcacctttatctaggtatctagatatctataggcacctttatctaggtatctaggtgcctgggaatgttcaaggacccagtttggattcaaccctgcagctagctggatcacagcctggtcaggacacggacagaaagcaggggaactggggaccttacagagaaactgtccccaaatatataaaacagcacccctgctttatcctgtagcctccttttcttcacagcgctgaccaacgtgtcaccacccaacacattacttggctttgtgttgatatcttgcaatctgcctctctctaaatctgggtactgctgtatccaaggtgccaaaaacagggcctgacaaataggcccttaaaagatacttgttagccaggcacagtggctcacatctgtaatcccagcactttgggaggctgaggcagatggatcacttgaggtcaggagttcaagaccatcctggccaatatggtgaaaccctgtctctattaaaaatacaaaagttagccgggcgtggtggcgtgtgcctgtagtcccagctacttgggaagctgaagaaggagaatcacttgaacccgggagggggaggttgcagtgagcagagatcgcaccactgcgctccagcctgagcaacagagcaagactctgtctcaaaaaaaaaaaaaaaaaagatacttgttgaattaatacataaaccatgcagcaaaatatttagctcatgggcaagctggaactcaacattaactttttttgtttttgtttttgagacggagccttgctctgttgcccaggctggaatgcaatggtgcggttttggcttactgcaacctctacctcctgggttaaagcgattctcctgcctcagcctcccgagtagctggattacagccactgccaccacgcccagctaattttttttgtatttttagtagagacgggatttcaccacgttggccaggctggtttcgaactcctgacctcaagtgatccgcttgcctcggcctcccacaagtgctaggattacaggcgtgagccactgtgcctggcaacatcaactattttaaaatgagaatcacaaaacctttccacattacttcccacctccacattcctggactgacaatatattgggctaaaagatgaggaaaatgtgggagagagtgcctaggaaggtgagcttcccagcaggcggaactagagtgtaagagcagcactttctcaaagtgaggaaatggaagttaaaagaagttctggctgggcacggcggctcacgcctgcctgtaatcccagcactttgggaggccaaggagggctgatcacgaggtcaggaatttgagaccagcctggccaatatggtgaaaccccatctctactaaaaatacaaaaattagccaggcgtggtggtgcgtgcctgtagtcccagctactcgggaggctgaggaagaagaatcgcttaaacctgggaggtggaggttgcagtgagccgagatcgtgccattgcattccagcctgggcgacagagcgagattccatctcaaaaaaaaaaaaaaaaaaaaaaagcagctctatgtttgcccacggtagtgccaggtggcctacacacaggagaatgagaacacttaggtgatgcgtgaagattttctgagaggcacaaaggtagagtttcagcgtcataaatttccaactcaattcccactggctctcctacccagctcctccttcacactcacccatctcccatgtttcagagaaaggcataaccatccacccatgctaaatcatactgaggtgaggtgcacggtcccacagggtgaaaatcccctgggcaccagaaagggcaattcaaaaggtcagtattcatgctaagaaagtgactgcctacagtgactaaggaacaaatccttgcatgagtcaggtggtttctaaaccttggccttcaagaaagttaaaggaggacctaaaagaactgtggactgacagattattaataattcaatgtgatttttcggcccataattcagaaggtgttcaaagaactgagtgatattgctgaaaaaaaaaaaaagccttcaactcctgtgtatttaatttacatgaagaaactttttcaatggttacagccaaagaaaaaaaaaagcactctgctcactctagtaaatatacaaataaacatggatagatacatgaggtttaaaaagctccacccagcttatttttttcgaggcagagtcttactccattgtctaggctggaatgcagtggtgtgatcacagctcagtgaagtttcaaccctcctaggctcaggtgatcctgccacttcagcctcccaagtagctgggactacaggcatgcaccaacacgcccggctaatttttaaaaattttttgtagagatgaggttttgctgggttgccctggctagtctctttttttttttttttttttgagatggagtctcaccctgttgcccaggctggaatgcagtggcgcgatcttggctcactgcaacctccggctcccggttcaaatgattctcctgcctcagcctccccagtagctgggattacaggcacacgccaccacacccagctaatttttgtatctttagtacagacggggtttcggcatgttggtcaggctggtcttgaacttgtgaccttgtgatccgcccaccttggcctcccaaagtgctgggtttacaggcgtgagccaccgcgtctggcccctggctagtctcaaacacctgagctcaagtaatctgcctgctttggcctcccaaaatgttgagactacaagcataagccaccacacccggcccacttagcttattaagagaaatactcaaataaaactttgttaacattgtttttatcaattgtgtattttataattgtgacaactcaatccaaaagaaacatttaatactcatgataacacaattttaaaaaagttttaattttgtatgtatttttgttgcagagaaatatgataaaccaaaggctttcaggcataaaatgtattattacatggtcaggcacagtatctcatgcatataatcccagcactttgggaagtcaaggcaggaggatcacttgaggccaggagttcaagaccagcctgggcaacatagtgagactctgtctctacaaaaaaatggaaaaaaaaaaaaattagctggaatcccagcactctgggaggcagatcacttgaggccaggagtttgagaccagcctgcctggccaatatggcaaaagcccatctctactaataatacaaaaattaggccaggcatgttggctcatgcctgtaatcccagcactttgggaggccgagggcggatcacgaggtcaggagtttgagacctgcctggccaatatggtgaaaccccgtctctactaaaaatacaaaaatagccaggcatggtggtacatgcccatagtcccagctactcaggaggctgaggcagaagaatcgcttgaaaccgggaggcagacgttgcagtaagccgagatcgtgccactgcactccagcctgggtgacagagcgagactccatctcaaagaaaaacaaaacaaaaattagccaggcgtggtggcatgcacctgtaatcccagctactcaggaggctgaggcttgagaagcatttgaacctaggaggtagaggctgcagtgagccaagactgcgccactgcactccagcctgggtgacagagtgagacagactctgtctcaaaaagaaagaaagaaccataaaaatagccaaccagcagcacaagggctgttctgcctatggtgtagccattctttattccattattttcctaataatcttgctttcatttggaaaaaaaaaattggctgagcatggtggcgaaagcctgcagtcccagctactggggaagctaaggtgggagtattgcttgagcccaagaggtcaaggctgcagtgagctgtgatcccgccactgcactacagcctgggtgacagagaccctgtctcaaaaaaacaaaaactattacattagaaaaaacttctgtgaggaaacaaagtggaaatatgagttcaagaaggaaaaagggccaagcatggtggcttacacctctaatcccagcacttttggaggctgagatgcaaggatcacttgagaccaggagtcagccggggcaacatagcaagacctcgtctctactaaaaataaaaagaaaaatcagccatatgtggtgacagacacccgtactcttagttactttggtggctaaggtgggaggattgagctcagcaggtcaagggtgcagtaaccagtgactgccactgcactccagcttgagcaacagagcaagatcccatctcggaaaaaataaaggaaaaaaagaacgatttgaaatttcgatggttaaataaaaagtggttctttttttttttttcaaaagatgagggaaatcaaatcaaatggtgtatatttagacttcactgcaggtttaaatgaggattttaacagctttattttaaaatatcaacattcacaattaaccagaacttttatcctctgtaatcttcaaaataaaaatgtgaaagtttcaatctaaagctatcaatctaaaactgtgccagcaggtaattttctttttcttttcctttttttttttttttttttttttgaaacagagtcttgctcttgtcacccaggctggagtgcagtggcacgatctcagctcactgcaacctctgcttcctgagttcaagtgattctcctacctcgacctcctgagtagctgggattgcaggcacccgccaccacacccagctaatttttttgtatttttagtagagatggagtttcaccatgttggccaggctggtctcaaactcctgacctcaggtgatctgcctgcctcagcctcccaaaatactgggattaccaggcgtgagccaccgcgctcggcctcccagcaggtaattttttctttctttctttcttttgagaaggagtctcactctcttgcccaggctggagtgcagtggcacgatctcggctcactgcaacctcagcctcccgggttcaagcgatttttctgcctcagcctcccgagtagctgggactacaggcatgcaccaccatgtccggctaatttttttgcatttttagttgacacgggggtttcaccatgttgaccaggctggtctcgaactcctaacctcgggtgatccaccctcctcaacctaccaaagcgctgggattacaggcgtgagccaccgtgcccggcccagagggtaattttcaaaacaaagctaagttcgtggcttgcctgccttcagctatcagccctcttcttctctccttaaggtacaggcaccaagaggggctcggagaccatttaaacgttatttaccaaggggacagattcagaccttggtgaagacagacagaggaggatttggtgggaatttagggccctgctgagacaaaaaccacccgaacccgtctgtccactttctatccatctaccagatctctagcatttcacccctttccccaggcctatgccagcactgtgccacaccaactcaatcttgatttattcaggtaaaatgagcactctccctcctgcaaaaacaaacacgtttaagacataaaacatattcaaaggcttccatttcctcaccgttagaattgagacttaatgtcaaagttcacttgggtaggttgaatcattttcccacaactaagggagagtgaaaaatctttgaaaactctgtaagcaaacacctgaaatgccaacgcctcctttgcggagctggggaaggaagagacgggtggccggatggcctccctcactagttggtgggcgtgagatccacgccgccccagtcccgggggccttcactaaaaccttaactggcctcccaggggagagggaagcggaggagaggggtctgaaaatcggagatgatcactcagctcaacagtaaagcactttatacccaccctatgggacagatactgtagctttattcccatttttcagatgagcaaacttgggatcggaaagataccccaaggtcacacaactgaagtggcagaagctagattcaagaatcaatcggcccgcaaagttctaaagggcagtggctttggtctgatcctgagtttgaatccacaatctccagccctttctagctgtaaaccttcctgcgcgtcctcagccgtaaaacagaggaaataacacgttgcttggtagggttgctgtcaagacaatgggccgtggatataaaagcacttgccttagtgctggccgcatacgacgcgctcaatacatcgtaactcaggctttcaaaagaggcccgtacgccccactaggccgcgaaattgggtcgcccggggcggtggcagccccgcgtagcagccgcggccagggcccgccccctccccggcgcccggctggctctcaccggcccgcgtggcgcgctacgtacccagcgcctccgccgtggcccaggcctccgcctctagcccaatctccgcagcgcttacaggccggctcagcgggcgaggcgggacctcgggagcgcgcgcctgcagaccggacgtccggccagcaggcggggccgggagaggttggacgggcggggccgggagaggttgggtgggcgggcggggccgggagaggttgggcgggcgggcgggcggggccgggagaggttgggcgggcgggcgggcggggccgggagaggttgggcgggcgggcgggcggggccgggagaggttgggcgggcgggcgggcggggccgggagaggttgggcgggcgggcggacgcgggagaggttgggcgggcgggcggacgcgggagaggttgggcgggcgggcggacgcgggagaggttgggcgggcgggcggacgcgggagaggttgggcgggcgggcggacgcgggagaggttgggcgggcgggcggacgcgggagaggttgggcgggcgggcggacgcgggagaggttgggcgggagaggttgggcgggagggcggccggacggacgcgggagaggccggcggggagagctcggccccggagcacggcacagaggtcccccgcaacccccgacccggagccataaattttcctttccccggagccgggaaggagagggagagagaggagaggggcaaaactgcagggtcctaacttcggatataaagctcggccactcgctacttgtgcagccttggcagaggtgatcatgagcactttccacctgccaggtcctaagagcactttgtgggattatctcagcccgcacagtccgcagggtggatactatcatcatccccattttacacaacaggaaactatgtttagcggttaatccatttgccctctcatacaaagtcatgtgattgcagagcccgcatcctgtccatacaagcctagcaagccactcagcctctcatcctgtctcctctcaaagtggggataatcgcagccgtgcagcgttgttgaaagaatacataaaagccgggcacggtggctcacacctgtaatctcagcactttgggaggatcacttgagcccaggagttcgagaccagcctaaacaagagtgagactaacccccgatctctacaaaaaaaaaaaacaaaaaacaaactagccaggcatggtgacagtgtggtctcatttactcgggaggctgaggcaggaggatggcttgagcccaggaggtcaaggctgcagagagccatgatggtaccactgcactccagcctgggcaacaaaacgagaccttgcctcaaaaaaaataaagcatctaggccgggcgctgtggctcacgcctgtaatcccagcactttgggaggccaaggcgggtggatcacctgaggtcaggagtttgagaccagcctggccaacatggcaaaatcccgtctctactaaaaatacaaaattagccgggcgtggtggtgaatgcctgtaatcccagctacacgggaggctgaggcaggaggattgcttgaacccgggaggtggaggttgcagtgagcccaagatccggtcactgcactccagcctgggagactacagcaagactctgtctccagttaaaaaaaaaaaaaaaaaaaaaaaaaaactagttatctagttatgcctcacatatagcaggaagttgtttttgttttttttttgtttggtttgtttgtttgtttgttgagacagagtttcgctctattgcccaggctggggtgcagtggcaggatcttggctcactgcagcctctgcctcccaggttcaagcgattctcctgccacagcttcccgagtagctgggactagaggtgtgcgccaccacatccagctaatttgttttgcttttgagatggagttttgctcttgttgcccaggctggagtgcagtggcatgatctcggctcactgcaacctctacctcccgggttcaagcgattctcctgcctcagcctcccaagtagctaggattacaggcatgtaccaccacactcggctaattttgtatttttagtagagatggggtttcaccacgttggccgggctggtctggaaatcctgacctaggtgatccacccacctcggcctcccaaagtgctaggattacaggcgtcagccaccatgcccagcacatctggctaatttttgtatttctagtagagatggggtttggcatgttagccaggctggtctcaaactcctgacctcaggtgatccacccacctcggcctcccaaagtgctgggattataggcatgagccacggtgcctcaccagcaggaagtttttaattaacacctaccctgtctcccttccctttccttaaactgtatctctattctctacttcctttaaggtaggaatcttgcctatctactactacaatacccagtgccctgcacagtagggattcagtatattgaggaattaagtaatttaacatctttctcagatcacctgagtccctgaaagctttcttcctgacttcaacagtcaaggagacctactgccatcacccaataaaaaggattccatcttgtgtccaaaagggccatttggtacaaacaccctgccagtatttgaatctcttccacattatctctgccatgtatacatgtacatgtcccatgttggggaactcactgccactcaagacagttttatttatttttttttttgagacagagtctggctctgttgcctaggctggagtacaatggcgtgatctcagctcactgcaacctccgcctcccgggttcaagtgattctcctgcctcagcttccctagtagctgggattacaggtgcctgccaccatgccaggctaatttttacatttttagtagagatggggtttcaccatgctggccatgctggtctcgaactcccaacctcaggcgatctgcctgcctcagcctcccaaagtgctgggattacaggtgtgagccaccacacctggctgacagttgttattttttcaagtccagtcttggcagttagaaagttctttcttaggcagtatctctcctagttttaaaccgtggggccatacagaacaaatctaattctattttatagagccagatttaatggctcaattcccttccttgatcaaacaatgtatagctaacctaatcctgtggttctcacccttttccctactcctgacacatccaagggatacccagactcccaccagtaatcatggctggccaagacagggataggaacaggcctggcctgtccccccaaattatctggatcttcctgggacacagtgttaggaaaccgtccagatgaccctacttttctcagatactgccttacagtattataactattcatgtacaagtgagagccttgtcttccaaggaggtatccttgtggtccgatttgccaaaagcagctgcacctctgccccaggaagatcccataggaaagggtgaagggctgctacagggccttcaacccaggcacctcctccataatgaaacttgggctttggagtttccatgtgatgccatcaagggctttttcagctcaaatatatgtctttcatgattcaggatggcaataagaaactttgagctggctgtagctacttacacaatctcattttatcctgagagtggcctgcatctcagtcacctctgtgtccttagcatttagcatgatgcctggaatacagttctgcttctcattttgtttgatgaacaaccctgagtccattagagatgactcctttggctcctggttttaaatttattttctgtacgtttatttatttatttatttatttatttatttttgagacagggtctcactctgttacccaggttagtgcagtggcacgatcttggctcactgtgacctctgcctcccaggctcaagtgatcctcccatctcagcctcccactgaatagctggaaccacaggcacacactcctcactttctaagctccagtcctaagtcatatcattctcattgccatacctcaaaagcacccaagtctcaggcacctggactttctacctagaaggtccaccccagtttgtttactgtcctgatgaacattcagctaagccaccatgtccccccaggatctcctgcctctggacagcctgtgctccccactttcttaggcactgtgctagaactgttctacccctgactctccagttcctgccatagaggctgacaagtcatcagtgttcccgaggttggaataaatgaatcacaatctatctcatggcttcgtaggtccaccagaagaaaggttatatgtggccgggcacagtggctcacacctgtactcccagcactttgggaggccaaggcaggggatcacctgaggtcaggagtttgagactagcctggccaacatggtgaaaccccttctctactaaaaatacaaaaaattagccaggcatggtggctcgcacctgtaatcccagctactcaggaggctgaggcaggagaatcgcttgaactcaggaggcagaggttgcagtgaggagagattgcaccattgcactccagcctaggcaaaaagagcaaagctccgtctcaaaaaaaaaaaaaaaagaaggttatctctgacatgctggaagtacagcaaaggccttgatctgtgatggacatcatgaagaaaacttttctttggttatcataccagtaatgctgacttcctgggaagggaaatactaattaagtgggtattaattctgtcctagacacttttagggctctctatgtaagtcttattttacagataatgacatcaaagctcagaggttaagtgacttgcctaaggtcattcattaagtcagaggcagagccaggatttagaacccagggagtcacactctgcctgcactcttttttatatatattttttttttcccaagacagagtcttgctctgtcgcccaggttggagtgcaatggtgcgatctcggctcactgcaacctccacttcccgggttcaagcaattctccctgcctcagcctcccgagtagctgggattacaggcgtccaccactgtgcccagctaaattttgtatttttagtagagacggggtttcaccacgttggccaggctggtctcaaactcctgacctcaggtgatccgcctgccttggcctcccaaagtgctgggattataggcatgagccaccgtgcctggccctttttcctttgagacagagcctcgctctgtcacccaggctggagtgcggtggcgtgatctccgctcactgcaagctccgcctccctggtttacaccgttctcctgcctcagcctaccaagtagctgggactacagacgcccgccaccacgtctggctaattttttgtattttcagtagagacagggtttcaccatgttagccaggatggtctcgatcccctgacctcatgatctgcccgccttggcctcccaaagtactgggattacaggcgtgagccactgcgcctggcccttttttcctatttatatagagacggggccttgccatgttgtccgggctggagtgcagtggcatgatcctgggttccagcgatcctcccacctcagcctcccaagtagctagaaccataggtgcatgccacaatgccacgctaatttttgtattttttttagagacagggtcctctatgttgcccaggcaggtctcacactcctgggctcaagtgatccacccatctcagcctcccaaagtgttgggattacaggcatgagccacctcacccagctatatttctgcataactccataaggcagaaccgggccagcttttcacaaaccaaaattgtttcaaagtggaaagctctcggctgggcgcagtggctcatgcctgtaatcccagcactttgggaggccgaggcaggcggattgcctgagctcaggagttggagaccagcctgggcaacatggtgaaaccccgtctctactaaaatacaaaaaattagctgggcatggcggtgtgtgcctgtaatcccagctactcgggaggttgaggcaggagaactgctggaatccaggaggcagaggttgcagtgagccgagatagtgccactgcactccagcctgggcaacagagtgcgactccatctcaaaaaaaaaaaaaaaacagtaattcaggccaggtgcagtgtctcacacctgtaatctcagcactttgggagagcgaggtgggcggatcacctgaggtcaggagttcgagaccagcctggccaacgtggtgaaaccctgtctctactaaaagtacaaaaattagctgggcgtggtggcaggcacctgtaatcccagctacttgggaggctgaggcaggagaatcgcttaaacctggaaggcagaggttgcaatgagtcgagattgtgccactgcactccaacttgggtgacagtgagattccgtctcaaaaaaaaaaaaaaaaaaaaaaaagcctgggcgtggtggctcacacctgtaattccagcactttgggaggccaaggcaggtggattacctgaggtcaggagtttaagaccagcctggccaacgtggtgaaaccccatctctactgtaagtacaaaaattagccaggcatgggggtgcgcacctgtagtcccagctaccggggaggctgaggtggcaggatcacttgaatccaggaggcagaggttgcagcaagccgagattgcgccattgcactccagcgtaggcgacagagcgagacagtctcaaaaataataataaataaaaataacacacaaaatatctttttatcttttattttattattgtaatcccaaagtgctgggattacaggcatgagccaccacgcccagcctactttttattttttttgagacagagtcccactttgtcacccaggctggagtgcagtggcagaatcttggcttactgcaacctccgcctcccaggttcaaaagattctcgcgtctcagcctcccaagtagctgggattataggcgcccaccactaagcccagctaatttttttgtattttcagtagagacggggtttcgccacgttggccaggctggtctcgaactcctgacctcaggtgatccacccacctcggcttcccaaagtgctgggattactggcataagccccagcgcctggcctggctttattattcttcttcttacctctgaccccccccttccctgcagctgcaaatagggcaatcgcgttgaacagcagtcttagaccccggagagttgagtgtggtgacagctctcagactgagtgggcatctttgactgccttccaaagtcaaatataaatgactgaggattatctgctgctttggatcataattacttatgcttatgccattgatataaaaacagagttgagttggccgggcgcggtggctcacgcctgtaatcccagcactttgggaggccgaggcgggcagatcacgaggtcaggagatcgagcccaccctggctaacacggtgaaaccccgtctctactaaaaatacaaaaaattagccgggtgaggtggcgggcacctgtagtcccagctacttgggaggctgaggtaggagaatggcgtgaacccgggaggcagagcttgcagtgagccaaaatcgcgccactgcaatccagcctgggcgacagagcaagagagcgagactccgtctcagaaaaaaaaaagaaagaaagagttgactatatttagttctgtgttttatttgtgttttctttccctgagtcagatgggaactgtttcttcccgccctgccattcttcccatgttgagatctttcccaaaggcaaagatcatttccctttttggccatggagcactctgatggtaagaattagtcctctcatcacccaccacactcaacccgaataggaaatttccaagaatgggaaccatgtctttgggcacttaggcgagattactcaatcaaaagagtgagactcagggactgaaacattcaatcaaggttaaaaacagattaaaatgtggcagttaccttttttcccctgatatagaatacgcactggagtcacagttaccttttagtaactgatttccttgagtgaatagtgtatcagaaaatgggacttttatggtggcaaagaattcagagggcctggggcacacagatctggatttgtataccgatttgccacttaaccagctatgtgactgtgcaatttaccaacctctcagggccacattttttcatctgtcaaaaaggtcaatatggccaggtacggtggctcacacctctaatcccagcactttgggaggccgaaatgggcagatcacgaggtcaggagttcgagaccagcctgaccaacatggtgaaaccccgtctctactaaaaatacaaaaattagccaggtgtggtggcgtgcgcctttaatcccagctactcaggaggccgaggcaagagaatcgcttgaacccaggaggcgaaggttgcagtgagccgagatcgcaccactgcactccagcctgggagtcagagagagactccgtctcaaaacaaaacaaaacaaaacaaaggttgaataataataataggacctatattgtagacttgttgagaggattaaatgagataatgtacgaaatgccttactacagagtctggcacttattaaagaaagagttgatgtgggctgggtgccgtggctcacgtctgtaatcccagcactttgcggggttggggtaggaagatccttagaggccaggagttcgagaccagcctgggcaacaaggcgagaccctcgtctctacaaaaaatatataaattatccgggtgtggtggctcatgcctatagtcctaggtacttgggaggctgaggtgggaggataccttgattgcagtgagctgtgatcttgagccattgcgctccagcctgggcgacagaaggcggccgtatttaaaaaagaaaaaagaaagaaagaaagaaaagaaaagaaaaaaagggtcgttgtggaaaattcttgtggggaattaaagggaccacgtgtgcgcgaaagagcttggcgaagataagtacctggaggccaagatgaggcggcgagccctgcctccctagcagtgtggtctcctggcttagggtcagtgcttcgcacaaaaaaatccactgcctctcatgagaccttgaactgccaatgaccgcaggttgcccagactcccgagtgaggaaggcggccaggagtcaactaggcttcttgcggaaaagcccactctaagaaggcctggggcattccggctccaggcaggtagcacccgcgggcctcaggccctttcacttacccgggaaacgtaacggtccttaacggcagccaataacggctcccagcggcccaggcactggcaagggcaggctgaaatcaaacctcggattttggaacctccacgcctgaaaccctaaaccagcatcgaactacaactcccatcatgccaggcggccgcccggttcccaagggtcggtcccaccaaccttgcgccccttctttcctcaaagcgtggccgaatgcctaggcttccgggtatcagtggccccgcctcttaatccgaccggagccgtccctcgtgattcctgggtattgtagtcagtttcctgggaaagagtcgctcctagtggcagctcgcttcgccagaaaaactacaaaacccagaatgcagcgcaaattccccttgtccaataggaaccccccatgtagtggggcgcggagccctgctctcgcaactcaagatggcggacgagagtgagacagcagtgaagccgccggcacctccgctgccgcagatgatggaagggaacgggaacggccatgagcactgcagcgattgcgagaatgaggaggacaacagctacaaccgggggtaacgaaatcctcggagtccaattcccgtccagcctcccacaacctgggtctctggggtgcggggaagtcaccgggagcttagtctagccccaccctcatgttcttattggctaagtcactaggattctgcctggcgattggttattgcctttgtcatttaccaagggtgggtgctctggatattaagggccggagacgttcagtacttttattatataaaagttctatgcagtgttccactcgtgtgcttcaggccattcctgggaaaagagcatgttggacgatggttttcgatggtacaacacaggacagtctagtaacagtacagttcaaagggaacgttacttatagacgtgttgtttgaacaacgtgactagcaataaacgaatcataaaacatttcgcagcagttcaccctcagtgaggaaactcatcagactatacaaactgtatgtataattatattgtaaaatatcactaccagagaatcccaaaatataaactcaccttataaacctatgtaattaacggtatggtaatgctttgatttacatagtttccattgctccaaataatccataagtatcctgaacgatatattaatataattaagtcttcgaacatctttgccttgttacctttgcagagcagccccaggcttcaagaaatgagcgatgttgtttcttggagagtatttggaatcctcgggctccatactgcctatcctgtactttagggtcttgccattagttactatttgttcctagggatgaagaaacacaccaggcatttgaatgttgaattcttttcccaaattagtttttacttctgtaagccacagcttattcatctttcttcacatggttagtgcctggcactggcactcacgctgtctctccccatcttcctgtctatatttgtagatatatttttaaactgaaagtcgtgagagatttttgggtgtataacttgctgagtctgaggtagtctgattttcgtagccagcttgttattcgcagtattggtggcagtgcagatataaaggtataaagaccaaggactgcgtagaagagatggtcccacaagattatagtacatatttttattgtatcctttctatgtttaggtatgcttagatacacaaatacttaccattgtattatagttgcctgcagtactcagtaacatgcagcagcctattgctcctaggctacaaacctgtatagcatgttactgtaatgtacaccatatagcctaggcatttagtaggctataccatctagatttgtgtaagtacaccctataatgttggcaaggcaaaaatcacctaaccatgcatttcccagcacatatgcctgacgttcagtgaagcatgactgtatttaagtggtttataatctgcttgtggtaaatcttaggttaaaagatctagcttttatgttcttcagccggcattaaaaatcacaggaagggccgggcatggtggctcatgcctgtaatcccagtactttgggaggcagatcacgaggtcaggagatcgagaccatcctggctaacactgtgaaatcccatctctactaaaaatacaaaaaatttagccgggcgtggtggcgggcgcctgtagtcccaactactcgggaggctaaggcaggagaatggcgtgaacccaggaggcagagcttgcagtgagctgagatcacgccactgcactccagcctgggcgacagagcgagactccgactcaaaaaaaaaaaaaaaaaaaaaaaatcacaggaagaaagtagaggaataggaagcttgccaaatttagtttttataagactgttctgttgctgtaactcacaacagatctaatgtaataaaagtcttcttttgaagtttgatattcctaaaaatggaagagctgagaaagaggaagtaggaacaggaagaagggaaagtgaagctctcctgagtagagatctgaatcacagatgagagttggtgaatgtgaaagtcattccagaagtgaaagtgtggcattttctttgctctttttgtagttgcttttatttttatcttcttaactgttgtcctgaccagtgtccttaggtttgtgccctataatctgtgaatcacttttcaaaactgtgtgccagaaagttattttattggcctggcgtggtagctcacacctgtaatcccagcactttgggaggccgaggcaggtggatcacttgaggtcagcagttcgagaacagcatggccaacatggtgaaaccccgtctccactaaaaatacaaaatttagctgggcatggtggcgtacgcctatagtcccagctactccggagactgaggcaggagaatcacttgaacctgggaggtggaggctgcagtgagttgagattgcaccactgcactccagcctgggcaatagagcaaagccctgtctcagaaaaaaaagtggcacacagtggctcatgcctgtaatcccatcactctgggaggccgaggcgggtggatcacgaggtcaagagattgagaccatcctggctaacatggtgaaaccctgtctctattaaaaatagaaaaattagctgggcatggtggtgcatacctgtagtcccagctactcgggaggctgaggcaggagaatcactcgaacccgggaggcggaggttgcagtgagctgagattgcgccactgcacaccagcttggcaacggagcgagactccatctcaaaaaaataaataaataaaattattttatttgtagtagaagtaagtgataaccttaaaaactttgacagtttgcagtggtgtctctgtgcatggttatggtctgggtgaaaaaattatgtttattagcgtcccaaatctaaagatctgtgaaaatgagtttggaggtagtaggtgaaaaaccaagggcctagtctggaggagagagtctaattctggcactaagaatctggggtagagtcaacatttttccatgaactttgagaggaaatggttttggggagaagcagcaatgtgggaaaatgcagcacggcacagtagaaaagcatggactttggaataatttaaatctggtctgaggccaggcgcggtggcgcacatctgtaatcccagcactttgggaggctgaggtgggcagatcgcttgtggtcaggagtttgagaccagcctggccagcatagtgaaacctcatctctactaaaaatacaaaaattagctgggcatgatggcaggcgcctgtaatcctagctacttaggaggctgaggcaggagaatcacttgaaaacaggaggcagaggttgcactgagctgagatctctccagtgcactccagcctgggcgacagagcaagcctctgatctcaaaatctcatctcaaagcttggctctgacacttaacagtcctgtgaccttgggaaaggtacttaactcagagttgtagggattaatgagataacatctggaatgcactccttttcctccctcctcctctttcttcagatcgtccctaacctcccagcttgcccctctgctcttatcacatactgtattgtagcttttatcgtaacaatagttataataacaataaatataactacatgtttggtaatttttcttaatgtgtctggtacctgtctcatctgacagtaaggagcatgtaaacaggattgtgtcttcgaaatgcctagcacttagtgggcattaatgagtatttgctgtatgaatgaatggcagatattaaagtgcctagcccagtattagtggagtttcatctcccctcaccaagtgagaggatgtcagatttttcttacatacacattttctctccccaaataattctcattgtaagcctcactacagtttttatgaaatacctacagaggcagggcatggtggctcacacctgtaatcccagcactttgggaggctaaggcgggcgggatcatgaggtcaggagatcgagaccatcctggctaacacagtgaaaccccatctctaataaaaatacaaaaaattagccaggtgtggtggcgcatgcctgtagtcccagctactcgggaggctgaggcaggagaatggtgtgaccctgtgaggcggagcttgcagtgagccgagattgcgccattgcactccagcctgggcgacagagccagactctgtctcaaaaaaaaaaaaaaaaaaaaagaaatacctacagaaaccaggaagctccaatttgctgtggagctttccactgttgtgtgctttccactgtgttttgcttcttgaaatgttttttgtcttaatattatttaaaatgttctcaaaaatcatgtaaaaattgacagagaagttttcctttcaatgctagagagtctaaaatgtgtaatatataataaaggttaatgatagttcgagctaacccttattctcctgggcctttttttttttttaaagagactgtgtctcgctatgttgctcagactagtctcaaactcctgggttcaagtgatcctcctgccttagcctcccaaagtgctgggattgtaagcatgagccaccacacccagcctcctgcccctttttttcaggaactaaagtcatagtactctatgctaataaaatgagctaaattcatgtactggattctgttgcccgggctggagtgctgtggcgcgatcttggctcactgcaacctctgcctcccgggttcaagaaattctcctgcctcagcctcctgagtagctgggactacaggagcacactgccacacccggctaatttttcatattttagtagagacggggtttcaccgttgttgcccaggctggtcttgaactcctgagctcaggcaatccacctgccttggcctccgaaagtgctaggattacaggtgtgagccaccacgcccggccagttgtattagttacttatgtctctttgtatatgaatttagttcttgacttttctggtcttgtgtttcctccgtaattaaatcagcataaacatttggtgaatataaaacttcatgtggttgtgtgtagtggctcatgcctgtaatctcagcactttgggaggctgaggcagaaaaatcacttgagctcaggagttcgagaccagcctgggcaacatggtgagaccccatctctataaataaaaacaaaaaaacccaaacccttcatgtatacatataggtatacatgcatacatatgcagtgtgtatgggtgcgtctcttcagtttttctatttaaaaattttttaatttaattttaaaattattgttattactttggaaacagggcctcgctctgtcgtccaggctatagtacagtggtgtgatcatggcttactgcagcctttgacctgggctcaagcgatcctcccacctcagcctcccaagtagctaggattgtagacatgcaccatcatccctggctaattttctttttaaaaagtttctgtagagatggggtctcactatttagcccaggctggtctcaaactgctggcctcaagtgatgctgccaccttggcctcccaaactgctgggattgtgggcataagctcctgcatccagctggttttgtttgtttttttactgcactcaatttcccccagttacgtgcctagcgtaattatcctgaacaattgagaggagagtcagataagataacctttatgcagcatccccctgtagttcgtgattcatctatatggtttaatttgatttttttttttttttaatgagagtctttccaagaagtattgccaaagaataaatctcatcagttggcagattttaatttgggggtaataagtgaagattgtctgagtgttttggaacaaaaaagaacttttagactattgtgttctaggaatctttcggaatttattttgcagtgtcttcagtgtcattgagatcctggtaagcacgggtcaagagccctctgacaagaggtgtctcatctccatcctgctctcttactccctgggacaggttaacatggattctttataagttctcctcatttcctggttgtgagatactatcccttatgaaaacttaggaggagagaaaagtctttctgaaaataaattccataaagctagccttacttgtttttgtttttttcttcagcttctccaagagtcgttctttccctatttatttgatggcttatagctgcagctagctcttggaaataagaaatctttttagttcctttttaatttctcccttcaacttttggtttttcaaaactagatcaaagcagaatggaaagagaaacctcatcactgatatcaaataagtgttctaattttgtttcccaattaaatggcaattaaaaagaaactaatcaagagctgcttcaaagagaagagactggaaagcagaagaaatggaaagtaaatgagagcctatttcagggactcgctgctcatggcacagcagttttgctgatttttcacattgttcaactaatatgctcacgctaaaattccccagctttactaagttggcagttaaccctttccctatagagcccatagatttatgagccatacatttagtaacttcaggaggatgcttctttaactctttctcttcagctttttatctgaaatctctacccttcaggcctctcttccaattcctcaaagaagatgtccttgtgattgttacatttaagggacaaaaatatggtgttctctattgagagcgccaaaaatactaaaccggaattcctccataggctcagtatttgcctcaaaaatgtcccagcactttgagaggctgaagtgcgcagatcacttgaggtcaggagttcgagaccagccgggccaacatggcaaaaccccatctctactaaaaatacaaaaattagctgggcgtggtggcacacacctgtagtcccagctacatgggaggctgagacaagagaatcacttgaacccgggaggcagaggttgcagtgagcccagatggcgccattgcacttcagtctgggcgacagagagagcctccatctcaaaaaaataaacagaacaacaactttctagagctgctctcttgagagacaactgaggagtcactatggttaagtgtttagtaaatgttactattattactacgtagtgggcattgtgctaagccctttacttggattatatcctccatgatttcacttatgaagactttagcgatttttgtttgtttgtttctttttttgagtctcactctgtcgcccaggctggagtacagtggcacgatcttagctcactacaacctctgccttacaggttcaagcaattcttgtgtcttaacctcccaaatagctgggatcacaggtgtgcaccaccattcccggctaatttctgtatttttaatagagacacggttttgccatgttggtcaggctggtctcgaactcctggcctcaagcagtccacctgccttggcctcccaaagtgctgggattattacaggcgtgagccaccatgcctggactttagttttttgtttttttgggtttttttgagacagagtctcactctgtcgcccaggctggagtgcagtggcgcgatctcggctcactgcaacctctgccacccaggttcaagcgactctcctgcgtcagcctcctaagtagctgggattacaggtgcctgccactgtgcctaactaacttttgtagttttagtagagacggggtttcaccatcttggccaggctggtcttgaactcctgacctcgtgatccatcctccttgtcctcccaaagtgctgggattacaggcgtgagccaccatgcctggccagactttattttttattatttatttatttatttatttatttatttatttttgagacagagtctcgctctgttgcccaggctggagtgcagtggcgtgatcttggctcaccacaacctccacctcccaggttccagtgattctcctgcctcagcctcctggatagctgggactacaggcacatgccaccacgcccagctgatttttgtatttttagtagagatggggtttcaccatcttggccaggctggtcttggaactcctaatctcgtgatctgcccacctcagcctcccaaagtgctgggattacaggcatgagccaccactgcgcccagctagactttagtttttatagtgaggcttgagatttgcatctccactggtctctttgacatctcagaggatccattctgaacttgctaggtttctttcccctgctgaattgagttctgcatcttgagtctgcagcagtgtgaatcctatctttggctccatttaacagcctatggacgttcccaaacttgggacccagtttgtctcttcatgatagacaaatattattttcagaagtcattctaatcgcaccactgcactccagcctggcaacagtgagactccatctcaaaaaaaaaaaaaaaagtcattctagtaggtgagatttctgccagcattgagccactgctcaacatattcttgataatggtctctgaacagcatttgattttaccttggagttgcaaagtcaaagtctaactcgccaaacaaactcagtgtggaatatacacatttgtctcattccggttttaaggagtttagtataccagagcttttgtgacctctaaaaagcagttatcgtccatgacaagaattggctcgttcaccctcagtactctggcttactatcccagggagggccgagggtggcagcaaaagtggtcttttgtaatccctttttataacctgctgttctcttcacagacctcccagggtacctttttttgtgtgtgtgtgtgtgagatggagtctcactctcacccaggctggagtgcagtggcgtaatctcggctcactgcaacctctgcctcctgggttcaaactattctcttgcctcagcctctcaagtagctgggattacaggcacccgccaccatgcctagctaatttttattttttatttttgagacagagtctcgctctgtcacccaggctggagtacagtggcgcggtcttggctcactgcaagctgcgtctcccgggctcacgccattctcctgcctcagcctcctgggtagctgggactgtagtcgcccgtcaccacgcccggctaattttttgtatttttagtagagacggggtttcaccgtattagccaggatggtctcgatctcctgacctcatgatccgcccacctcggcctccctaagagctggaattacaggcgtgagccaccgcgcctggccaatttttgtaatttttagtagagaagggttttgctatgttggccaggcttgtctcgagctccagaccttaggtgatctgcccgccttggcctcccaaagtgctgggattacaggcatgagccactgtgcccagccccagggtaccttgatggcagtactaaagtgtttttatttttcccatcatttgggattcacaagcagtttttgatataactaattggtgggaatgtgcggagttgggggtattgcactgagtgatccttagccgcagaagtacagagactagacagctgatactgattcatgccatgtcatttccttctgggcatctttgccatttcattcacctctctttggtctttctgagtactaataggattattagtgaacttaccatacttcaagagttaattgatttgcaaaaggatttcctgatgtctaaaagtagaatcaaaaggatattagaggttagagtttattttaataagtttctctggaaaatttgaatttctgcccaaaaaattcattttttatttgagacaaggtttcactctgtcacccagatcgtagtgccatggtgcagtcctcctacttcagcctcccgagtgactgggactacaggctaatttttttgtctgtgtgtgtagagacaagatctcactatgttgcccaggctgatctctaactcctgtctttttgtttttcagaggtagaaaacaagtggtggctggtccaagtgcagtggtgtttacgactaatttgtcataaccagttatagatttctttgttccttttccactcccactgcttcacttgactagcctttgaaaaataaaagtaaaaagcaagtggccatgagatctgagagctacagtgaaaaagaaaagtggccaaatttgtgaattttatttcccaaacttttttttcttatgttgtaaacctgtggtctgtgtttaagacattgaaaccattagaagtagttacattagagcttttttgtttgtgctttatttacttattagagatggggtctcactttgtcacccaggatggagtacagtggctattcacaagcgtggtcgtggggcactactacatcgtgagactcctgggctcaagagatcctcccgcctcagcttcctcagtagctgggactacaagttcacaccaccacacctggctggacctgttttagcttctcaaggagtaggacagagcctaaggagagagaagacaatgaataagaaaattagggctggacatggtagctcacatctgtaatcccagcattttgggaaattgaagcaggtggatagcttgagtccaggaattcaagaccagcctgggcaacatagagaaactttgtctctacaaaacatataaaaattagccaggtatggtggcgtacgcctgtagtcccagctacgcaggaggctgaggtgagatgatcgcttgaacctgggaggttgaggctgcagtgagccatgattgtgccactgcactccagcctgggtaacagagtaagaaactgtctttacaaaaaaaaaaaaactcagtatttttttatttgagatggagtctcactcaggctggagtgcagtagtgtgatctcagctcactgcaacctccccctcccaggttcaagcgattcttctgcctcagcctcccaagtagctgggattacaggcgtgtaccaccaccacacctggctaatttttctatttttttagtagagatggggtttcgccatgttggccaggctgatctgaaactcctgacctcagctgatccacccaccttggtctcccaaagtgctgggattacaggtgtgagccaccgcacctggcctatttttttttttgagatggagtctctctctcttgcccaggctggagtgcagtggtgcgatctcagctcactgcaagctccgcctcccgggttcacgccattctcctgcctcagcctcccgagtagctgggactacaggcgcccgccacgatgcctgcctaattttttgcgtttttagtagagacggggtttcaccatgttagccaggatggtctcgatctcctgacgtcgtgatccacccgcctcggcctcccaaagtgctgggattacaggcgtgagccaccgcgcctggcctattttttttaataaaaaaagaaagttgataatttaaaatcccaatcagtagctcaagagcacagcatttccattgctctcatagaatattaacacagctgtcctgtgcaaacagaactgaagatgttttgctgaccctcttttgggctctagcttttcaaggtcttattttagtctattatgcctgtaaagcatcagtcaagcatataattgttgaactgttaactgtgtgctcagcacaactagaggcgctgtgggaagcagctgtataagatgtagtctggccgggcgcggtggctcacacccgtaatcccagcactgtaggaggctgaggcagatcacttgaggccaggagttcgagaccagcctggccaacatggtgaaaccctgtctctactaaaaatacaaaaattagccaggcatgatggcacatgcctgaaatcccagcttttcaggaggctgaggaagagaatcgcttgaacccaggaggcggaggttgcagtgagccaagatcacgccactgcactccagcctgggcaacagagcaagactctgtctcaaaaaaaaaaaagatgtagtccctattcttaggaaattgttaatgtcatcgggaagccaagaaagcaatatattattatatattaagtgttttaggagattatagttttaaaacaggcagacatcagagaactagaatagtcagagctgactttctggataaaacatgactcactttcctcattacttctaatgcttgctcctctcaaacaccaaagctgtgttctatagcccagtgtgaggaaacaatattctcttggctttggaggattctcaaatcaattcttacagggaacgaagccatagcctttggggggaaatggccccaagccaagtctttagagattgatggctcctccctagatgctagttggttggttgataaccaatttgcctcacatctctgggccttagtttcctcatctgtaaacaacaagttaagccagatggttctgagattccagtgttggaagctcagcttcccctcccctatgatagagctttttcttcccaggcatgcagttttgagcggattgcatcatccagtaagactgagaggaggcccacatatggaccctcgctgctcctgttgtctagaagttcctcttctcctgctgttcatctgccagcttacccttacctcccacccgctcacatacccagcattgcgctctatttctagaaataagtactgaagttagttttccatctcctccccaaggtctgaatttatacaggagcatccttaggatgtcttacatctttgaacttgtaacattttggtcttcattaaaagatgactttttttttttttttgagacagagtctcgctcagtcgcccaggccggagtgcagtggctggttctctgctcactgcaagctccgcctcctgggttcacgccattctcctgcctcagcctcccgagtagctgggactacaggcgcccaccaccacgcccagctaatttttttgtattgttttttagtagagacggggtttcaccatgttagccaggatggtcgcgatctcctgacctcgtgatctgcccacctcggcctcccaaagtgctggtattacaggcgtgagccatcgtgcccggccgagatgacatttcttgattgcttttctgctctgttcctggatcttttattctaattcaccctgtatttgctaggttggtcattgatgacttcttgagttgatcaactttagaatataagtctcacaatttttgtatgaactgccatctgccttctgggggaggaggcacttctgttgctgcaccaaggcaaactttactgaattctctactctttattttggaaccaagtgaaacaagttggactttggtttgctgtattctaagattctggttctggccaatctcagtttgaaataaggtgactggcagcttagatctgtgagagatttctatttcagtgtgccgaatcgcagcatgccctaggattcccacccagtgggtgtggacttcaaatccctttaaaaaggatgccagccaggcacggtggctcattcccataatcccagcacttttggaggccaaggcaggaggattgcttgagcccaggagtttgagcccagcctaaaattagccaggcatggtggtgcacacctgtagccccaattactcaggatgctgaagcaggaggattgtttgagccaggagttggaggcaggagctggaggctgcagtgagccatgatcgtgccactgcactccagcctgggtgacagagcaagaccctgtctcaaaaatgaacaaacagccaggtgcggtggctcacgcctgtaatcctagcatgttgggaggctgaggtgagtggatcacttgaggtcaggagtccaagaccagactggccaacatggtgaaaccccgtctctactaaaaatataaaaattagctgggcctgatgctgggcgcctgtaatcccagctactcaggaggccgaggtgtgaggatttgcttgaacctgggaggtggaggttgcagtgagccgagatcacaccactgcactagaggctgggcaacagagcgagactcttgtcttaaaaaaaaaaaaatggctgggcgtggtggctcacgcctgtaatcccagcactttgggaggccaaggctggcagatcatgaggtcaggagttcaagaccagcctggccaacatggtgaaaccccgtctctactaaaagtatgaaaaattagccaggcatggtggtagtcccagctactcaggaggctgaggcaggagaatcgctgaacccaggaggcggaggttgcagtgagctgagaacacggcactgcactccaggctggcaacagagcaagactccgtctcaaaacaaaacaaaaaaagaggccaggcacggtggcttacgcctgtaatcctagcactttgagcggctgaggcaggcagatcacctgaagtcaggagttcaagaccagcctgaccaacatggcgagacctcatctctactaaaaatacacagattagctgggtatggtggtatgtgcctgtattcccagctacccaggaggctgaggcagaagaatcactggaacctgtgatgaggaggctgcagtgagccaagattgtgccattgtactccagcctgggtgacagagcgagactccatctcaaaaacaaaaaacatgaatcaagaaacaaacaaaaaatgatgccagattcctggagaaggattagcctggcttctgtggggtcctctagttttgttttcccttagtccaaattgaggccattcttctgtgaagtggcgttggcttgctaggatgctttttgaagttctactctcaaggcctctgagcttggttccctatgaataattaaaattattataattaccatgaaagctaactggagtgggctccttggaagtctggttttgctgaattggttgtcttctgtttgggggtgttgactgtaagactatgtgtactcataatgtgtcctcacggatggggctcaatacttggtagctcagtgaaaatgactcattaaagaaaaaaaaaaaaaagtggccaggcacggtggctcatgcctgtaatcctagtactttgggaagctgaggcaggtgaatcacctgaggtcaggagtttgagaccagactgaccaacttggtgagaccctgtctctactaaaaatacaaaaattagctgggtgtgatggcacatgcttataatcccaactacttgggaagctgaggcaggagaatcccttgaacctaggaggcggaggctgcagtgagctgagatcgtgccattgcactccagcctgggcaacaagagtgaaactctgtctcaaaaaaaaaaaaagaaaagaaaaaacaacttccctgtgttcttcagccgtgtgcttgatgtacaagttgaaacaggatttttgctcagtaactggctgcttgtacaaattcaagccaatataaagaaaatgaaatttgctctctgattttagtttcggtcttggagatttctagatacttgtattggcaatgcataaagcagaacaagagttcagcccaagatccttccacaaaaattgggttcatgaggtgatagctacatggaagtatctccgctaaataggaagaacaaaggcaggaaggtagtttttacagtgattttgcatatttgtaaagacttttaaagttggaagaagtaattattttccccatgtgaaattatgtttagtaagtatccagttggttaatctacagcagttcttcaccttacctttttgattctttcttttgtagaattataaaaagttattcttatggtaattcatattaccataatttgttccataagctgttatggaaccagctaatttgtggttatggaccagataatttgttccataagctgttatgaataagaatttatattataaattgtatccaacaatgggacactgctttgtctcctaatatcagccaggtcttgtttgtttgttttttgagatggagttttgatcttcttacccaggctgtagtatagtggtgcaatcttggcttaccacaatcttcacctcccaggttcaagtgattctcctgcctcagcctcccgagtagctgggattacaggcatgtgccaccacgcccggctaattttgtatttttagtagagacagggtttctccttattggtcaggctggtctcgaactcccgacctcaggtgatccgcctgccttggcctcccaaagtgctgagattacaggcgtgagccaccgcacccagcctatgagccagtttttaaatcttataatgcttcacgtaatcctgagactgaagtgaaaatatctggagtaggaaaaccacagagttgtcctaggctgcagatggtcctgtgtgcaataacaaaattgagttactaagaagaagaagttatctttaggccataaatgactttatggtttctgttgtttgccatggccttgggggttttgctgagcatctggttttaaggaagttaccttatttcccctttgaatgttctcagtcttccttccatgttaatgccttctgggtctcattaatatcataccaagtaggtgtacttgcatctagacttcatgaccttatgcttggactaaaggaaccttcagacttaactggatctctccctgtcacagtctttctgcatcaggggcactgagaggcccggccagatggaagctgtgggaggcaagagtggacagcgtaagtgggaaatgagggtgataggcctagggaaaaattgggcttgataccttccaagttaagaagccgctgttactctaggatttcaagcatgggggggacacatggaaagccattttcacagaggtgagtcccacagctatatagagttcaggtgatgcagaaagattgtgaaggcaaagagatccagaaaaggctggaggtaacttaagtccaagggtaaggtcatgaagtctggatgtgagcattcctcccaggaacaggaagagataggagaatctgaagacattctgtgaagagaattggcagcatgtgatttcagatcactttctccctgtatatatatatatacacagtatctgtctgtgagatgatagtaatattcataataactccgaggcattttgagaccctgaagtctttctgaattataaattgtatttaacataatgttaatggaaaattgtattttatattgttttaattcttgggggttttggtgtttttttgtttgtttgtttgtttgttttgagacagtgtctggctgtattgcccaggctggagtatagttgtgcgattttagctcactgcaggctcctcctcccaggcttcaagccaacctctcaactcagcctccccagtagttgggactacaagtgtgcaccaccacacctggctaatttttggatttgtgttagagacggggtttcgccatgttgcccaggctggtctcaaactcctgagctcaagtgatccgcctgccttttcctcccaaagtgttgggattacaggcatgacccaccatgctggacctttcaattatttgaaaattgattgtctaaaatatacagttaaaattacctctgtgtttagctgattctacagattaggattcactgtactcaggttggactcctaattttgacttttctttttttcttttcttttctttttctttttttttttttccccaagatggagtcttgctctgtcgcccagagctggagtgcaatggcatgatattggctcactgcaaccacagcctcccgggttcaagcagttctcctgcctcagcctcccaagtagctgggattacaggcgcatgcctccacgcctggctaattttgtatttttagtagagacggggtttcaccatgtgggtcaggctggtctcgaactcctgacctcatgatctgtctgccgcggcttcccaaagtgctgggattacaggcataagccaccgcgcccagccaattttgacttttcagtgtggctaagaggctgagcatggtggctcacacctgtaatcccagcactttgggagttcaaggcagcaggatcactcaaacctagaatttgagaccagcctgggtaacatagggagacccctgtctctattttttaatttaataaaacattaatgaggctaagaaactttttgcttcattcatggggtgtgtcatgtaggggaaagcagcacaaggaagtccccttgatcacgtgcacacatgcacacgtgcatacacacagacatgtttcttttatttatttatttatttttattttttgagacggagtctcgctctgtcgcccaggctggagtgcagtggcgcaatctcggctcactgcaagctccgcctcccaggttcacgccattctcctacctcagcctcccaagtagctgggactataggcgcctgccaccacgcctggctaattttttgtatttttagtagagacggtgttttaccatttagccagaatggtctcaatctcctgacctagtgatccgcccgcctcggcctcccaaaatactgggattacaggcgtgagccactgcgcccggccacatgtttcttgtaatctctccatggcaggagtaactgggtgctattgttgttttagtttcccaagattcctaatgctgggttttgccagtggtgatccctcagtctgagcttgccgacagttgtcctcaatcctgcagatctggtttaggcatttcttttttttttcccttttttttttgagacggagtttcgctcttgtttcccaggctggagtgccgtggcgcgatcttggctcacaacaacctctgcctcctgggttcaagcgattctcctgccttagcctcccgagtagctgggattacaggcatgcgccaccatgcccggcttattttgtatttttagtagagacaggctttctccatgttggtcaggctggtctcgaactctgcacctcaggtgatccgcctgccttggcctcccaaagtgctgagattacaggtgtgagccaccacacccagccttttcctttttttttttttttttttttgagacagagtctcgctttgtcacccaggctgaaatgcagtggcatgatctcggctcactgcaagctctacctcccaggttcacaccattctcctgcctcagcctcccgagtagctgggactacaggcgcccgccaccgtgcccggctaatttttttgtatttttagtagagatggggtttcaacatgttagccaggatggtcttgatctcctgacctcatgatctgcccgcctcggcctcccaaagtgctgagattacaggtgtgagccaccgcgcattgctgccttttcctttttttgagacgaggtctgtctctgtcatacaggctggagtgcaatgacgtgatctcaactcactgcaacctccacctcccgggttcaagcagttctcctgcctcgtcctcctgagtagctgggactacaggcatgtgccaccaggccccagctaatgtttatatttttagtagaaacagggttttgccatgttggccagtctggccttaaactcctgacctcaagtgatccacctgcctcggcctcccaaagtgttgggattacaggtgtgagctaccacgcctggctgatttgggcatttctcatgactgaccattttggacacagattgtggcaatgttaatgtgcctttttcctcatccctcactcccttttcatactgtcttgtgctccagatccagctggggaaaatcatgaaacctaatacatttgggaggtggaggaaggaagggcaaagcattccagaaagcccatcactgccttttggctgtcatccttttacattcagagttcaaggaagtattgtggtatgaatgccttgttaacaattatcattcgtctttggtgccattaccctggcaatataaagaaaataagcaacataaaagcaagaacggaaaaggccctttcacacaaataggacatcccttgcccagcactccctccctgaaagccgagggggcgcgagtcaggaggagtgctggtgtcctccaaatgccctttctggacctgggttcttcagcctgcttctgaagccaacaggcttgattaaggaaggtctggctccacagaaagctctttgtcaggggtagcacaaaacagattttttttaaaccctgcattagtatttactttttgttacagtggtttgagtccagccaatgacactggagccaaaaagaagaaaaagaaacaaaaaaagaagaaagaaaaaggcagtgagacagattcagcccaggatcagcctgtgaaggtaacaaggaggttctgttttttgtgactcagtcactttttcacatgagagagttttgaggtgaatgtataggatcaacttggattgacgttctccactggtattacttcaagatggaagagttggatcccagtgctgtcctctgctgccctagacctaggtgatgaaactgctctcagtaccctaaaagacacagcaggtcagacactgactcccaagcatggtgcccatcagaatggacaggtgcgtactgcatgtgctgctgtgccagtgccctggggagctacgtgtgacagcccctggcgcctagagcagtggttctctgtcttaagtccccaccgctctgacaatgaaaggccccccctttctttttgagacagagtcttactctgttgcccaggctagagtgtagttcatgattatagctcactgcagcctccactcctgggctcaagtgatcctcccacctcagcctcccaagtagctgggactgcaggtgcatgccaccacacctgtccagtttttttttttttttaattttttgtaaagatggagtctcactatgttacccaagctgggtcttgaactcctgggctcaagcaatcctcctgccctagcctcccaaagtgctgggattacaagcgtgagccactgcattcagccaaagacttcttcttaagacctttatatatttgcaaacattctcttaatgccatagtcattataatgaaagccatgagtcccacagagtctttctgagttctactccatgagaaccactggcctaaaggcttacaacctgagagtgatgcactggcatgaaacccagagatatgggtaaggattgttttgtttcttaaataaaacaacattacaaaataaaacaattgcaggtaagtgttgtcttcttcaaagtaggctgacagaggcagggggacaactcaaacatattcataattcaccttttaaaactgcctctgagacctggggtggtggtttatgcctgtaataccagcactttgggaggccaaggcgggtggatcacctgaggtcaggagttcaagaccaccctggccaacatggtaaaaccctgtctctgctaaaaatataaaaaattagttgggcgtggtggcaggcgcctgtaatcccagctacttgggaggacaaggcaggagaatcgcttgaacccaggaggcagaggttgaagtgagctgagatcacgccactgcactccagcctgggcaacagagtgagactctgtctcaaaaaataaaaattaagtggccaggcatggtggctcacgcttgtaatctcagcactttgggaggccaaggcgggtggatcacgaggtcaggaatttgagaccagcctggccaacatggtgaaaccctgcctctactgaagatacaaaaaaaaattagccaggcgtggtggcacgcacctgtaatctcagctactcaggaggctgagacaggagaatcacttgaacccaggcggcagaggttgcagtgagccgagatcacgccattgcacttcagcctgggcgaaagggtgagactttgtctcaaaaaaaaaaaaaaattaaaaaaaaatttaaaaaaaggaacagcctctgaaacagtttataagcctcgcaaaaatccatattcattccaatatacccacactttgctgtatgcctcaaatgttatgcctcagcttgaatctgctaccttattgagatatgacttcaagtaatttttttactatttccaatataaaacccgctatgaaaaaataccattattatttaataccatgttgcacttcatttaaattagctccaaaccatcaccatccctacaaggtaggtaggggtcttccctttttattcatttaatttatttttgagactctgtcattcaggttggagtgcagaagtacgaacatggctgaccgcagcctcaacctcctgggctcaagcaatcttcccacctcagcctcccgagtagccaggactacaggtgtgcaccacgacacccagctaatttttttattatttgtagacatggggtctccctgcattactcaggttgatctctaactcaggctcaagagatctgcctgccatggcctcctaaattgctgagattacaggagtgagccatcacacatggccgagaatttatttaataaactgcaaggggaagaaaattaaaatgccacttcccaggcctaagcaatatgaacatactggtttatattctttctttcctttataatctaagtgaaaaacagaaaactaaataaaaatattagaagaaaatgtatgtagttttattaatctaagtctgacataggacccagaagccataaaacagaaattgacaaatttaaaactttgtagaagtcaaaagataaacaataatctgggaaaatatttgcaacatatgtattagtttaaaataattgaatgaataggcagttcagaaagaaaaaatgtgtaatcagtaaataataagatggttaaagtcataatggaagaaatgaccattaaagcaataattatttctcttagattggcatagattaaggcttggtaaacttttttttttttttgcgagacggagtctcgctctgtcgcccaggctagagtgcagtggcgcagtcttggctcactgccagctccacctcctgggttcacgccattctcctgcctcagcctcccgagtagctgggactacagccgcccgtgaccacactggctaattttttgtatttttagtagggacggggtttcactgtgttagccaggatggtctcgatctcctgacctcgtgatccacccgcctcgacctcccaaagtgctaggattacaggcgtgagccaccgcgcccggccacttttttttttttaatagggacaggggtctcactatattgcccaggctggccttgaactcctgggcttaagcagtcctcccgcctcagcctcccaaagtgctgggattacaggtgtgagccaccaagctcagctgaggcttggtaaatctaatggtgagggtcaggagctactctcatacactgttcgttggattactgatagtctctttttagagagcaaattgatgataaatcatttcaaaagtgcataccttttgacccagcaggcctctttcttaacttcatcctacagaaatatatatcccagtgggtaaaaatagatgtataagaaaatttatgctgggtgtggtggcctgtaatcccagcattttgggaggctgagttgggcagatcgcttgagcccaggagttcgaggccagcccaggcaacatagtgagaccccgtctcgacaaaaaaacaaacaaaaaaattacctgggcctggtggcacacgcctatagttccagctactcaagaggctgaagtgggagaatcccttcagcccatgaggttgaagccgcagtaagccatgattgtgccactgcactccagcctgggcaacagagcgagaccctgtctcaaaaaaaaaagaaattcactgcaacattgttgtattactaaagaacaaaatcaccaaaatgcccatgagtagggggctggctaaatatactgtggtccatacatacagtggacttggtagaatgggtaggtccaggtgttttcacctggaaaggtctctaagacagtctttaaagagcagtttgtacgataatattatatgatccaattttagtttttgaaaagtgtgtgtgcatttggaacttgtatgcaaaaaagtctggaattatatttgcctcttctcaccttcccaagtgaagactattgatcacaaagattatatttgggggatgggattgtgggtgtttactttctatgtgtcttacacatttctgcattgtttgaaatttacattgagcatgtattacttttgccatcaaacaacataagactaataaggggagaaaccctgcgggcagcacccacccatcatatagctcattgtcaaccactttttctctggttgtaatgacctctgggattaggacagaggaaccaaaccccttctttgaattgtaccctttaactctttttttttttttcttttttgagatggattcttgctctgtcacccaggctggagtgcagtggtgtgatcttagcttactgcaacatctgcctcccaggttcaagcaattctcgtgtctcagcctcctgagtagctgggattacagggacacgccgccatgcctggctaattttttgtattttagtagagacagggtttcaccatgttgcccaggctggtcttgaactcctgagctcaggcaatccacctccctcggcctcccaaagtgctgggattacaggcatgagccactgcgcccagcactctttttttttttttttttgagacggagtctagctttgtcgcccaggctggagtgcaatggcgccatctcggttcactgcatcctctgcctcccaggttcaagtgattctcctgcctcagcctcccaaaatagctaggattacaggtgcccgccaccacgcctggctaatttttgtatttttagtagagacagggtttcaccatgttggtcaggtgggtctcgaactcctaacctcaagtgatctgcccgccttggcctcccaaaatgttgggattacaggcatgagccactgcacccagctccccttaactcttgaactcataattaatcaaaagtcttactaacataatgggccttttttctccccaactttgtcttgtccagatgaactctttgccagcagagaggatccaggaaatacagaaggccattgagctgttctcagtgggtcagggacctgccaaaaccatggaggaggctagcaagcgaagctaccagttctgggatacgcagcccgtccccaagctgggtatgtacatgcttgctttctttgccaggtcaggggcgagggatctgcctcagctgtgccttcatgagggtttcatgctgaattactgtagggagggcagtagagtcctggagttccttggtagttgttttcagagggtggtttttaaaaatgcagcataaagactatcattcagagaccttaccattttatagcagcacaccttgagaacaaataatgattcttgccaacagcactggctcacacctataatctcagcactttgggaggccgaggtgggaggattgtttgagcccaaaagttcgagaccagcctgggcaacatagaccttgtttccacaaaaagtaaaaaaaaaaaaaatagccaggcatagtgacatgcacctgtagtcccagctactcaggaggctgaggtgggaagatcacttgaacctgggaggtcaaggcggcagtgagctgagatcacgccaccgcactccagcctatgtgacaggagtgagacccccaactcaaaaaacgaacaaaccaaaaaacccaaaaaaaaaacaaaacaaaactattggcacatgaagagtgggaatgtctgcccagaggtcttttttccacttaggtttatagagactttgtcttgtttgtctgggcacatgtttattcctggaatgggcaaagtccccagcctcttcccctttgtctcctagccaatgcatgcttactaaatgcaaagtggtttgagattttgcttagcagtgatggttcaacaacaggaatactatatatagatttcattagcaccccttaaaaaagctataatgaattgctaaaggggtggaataggcagaatatctaaaaggattctggaagggactggatcctgttagacgtgcctgccaagactgagccaagccaaccttgatggctgacttcaggactcagctgacaaagtttctgaagtggttgtaacatgattctggacccattggtggcctagttcctgttttctttgtgactgggaaagtaagtatgttgaaaaaaacatattccaacaccaaatgtaaatgactttcagcttgtccacattactgctcccctccagaaacacaatgagacttcactagtatgttcggtgcagaggaggagggtggggcagggccagacagggtagggctaaagactggtgaggtgaggaaggcagctgtgcccaaggagatttgtttgctgcagaggttgggagcagctaatccatgaggcctgcagacctgcaggatgggcattgcctaattgctagtagaaatgcagtttgtcgggccccaccccaaagctgcagaatcagaactgccagaggatttctgtccactttgaaagtttgagaagctctgctctagagcggatgcagttcttagaagcttggtcacaatagaagcaagctgaggaggtgcatccccacgggtgagggagagcagagcactgcccaggtggacaagaggggtgctgattcccccatcaccgtgtgtgtttggctgccctcatcggccaggtcccaggcccactggctaagccctccagcaaggctttgggccacagggtagggtcccagtgaccagtttctcgctgaggagcaggaaagatgcagagagccacacatctcacctctgaatgaaatccctgatgaggtgttgtgtggtggctgccatgtatcttggctctgttttcagatggcattttggagttttggtttgattttatttttcctgaggaatttgcaaatgagtaaccttgctacattcttcacagatagtggcacttgggaaagaggcagattgaggctgggcgcagtggctcacgcctgtaatcccagcactttgggaggtcgaggcaggcggatgacctgaggtcaggagttcgagaccagcctggccaacatggtaaaacctcgtctctactaaaaatacaaaaactagctgggctggtggcatgggcctgtgatcccagctacttgagagtctgaggtgggagaatcacttgaacctaggagacagaggttgcagtaagctgagatcgcaccactgcactccagcctgggcagcagagcaagaatgcatctcaaaaatgaatttaaaaaaaaaaaaaaagaggcagcttgggattaatttgcttctgttcctcttcagcccagcatactttgttttcctttcacctgtaaatgtagaaagtgcttcagtttagttctcagaaagctcaagagaaaaccacacagttgctcatacgggccctgacactttgaggaaggaggaacaaggtctggttttatttcttctggctttgccttctgtgcagtgtgtggtgtcggactccatggaagagcagtcaccctgagcatctgactagtctgcctttgaggtccagggtcagtcaagccccagttagattcctgtgtttgtgtcagcctgtaaaaagtgccaccttggcaggcgtgttagcctgcatggctgaggcgtcaccctagttctgagttttctcaggggtggtggtacctacagcttcttgccctaatttttttttcacttaattggaggactaatgattataaatctcgtgcatatcagctgcactgtgtttttacagtactctccaccttcttgggagagttttaattagatggtattccactaaagaaacctacaagtctctctgatttatttatttatttatgagacagagtctcactctgtcgcccaggctggagtgcagtggcgttttctcggctcactgcaacctctgcctcccaggttcaagcagttctctgcctcagcctcccgagtagttgggattacaggtgcccaccaccacgcccggctaatttttgtatttttagtagagacagggtttcaccatcttggccaggctggtcttgaactcctgacctcgtgatccacgtgccttggcctcccaaagtgctaggattacaggcatgagctaccgcacccggccctctcttttattttcttgagacaggatctcgctctgctgcccaggctggagtgcagtggtatgatcatggctcactgcagccttgatctcctgggctcaagcaatcctcccaccttagcctcctgagtagctgggactacaggtgcctgccacatgcctggctaatttttaaattttttgtggagacatggtttcactatgttgaccaggctggtctcaaactcctaggctcaagctgtcctcctgtcttagcctcccaaagtgctgggattataggcgtgagccactgcacctgactgagacctgcaattctttagaagcttaaaattatcctaggtttaccatggaaaggccttcttaggccgggtgtagtggctcaatgcctgtaatcccagcactttgggaggccaaggcaggaggattgcttgagcccagcagctcaagaccagcctggacaacagggaaagacctcgtctctacaaaaaaatttaaaaattagccagacatggtagcacatgcctatggtcccagtttctcaggagactgaggtgggaggatcgtttgagtcctggaggtcgaggctgtagtgagccatgatcgtgccactgcactctagcctgggtgacaaagcgagtccctgtctcaaagattaaaaaataaataaataaaaatgaaaggccttcttagcagaagtgttttagtctgtgtaacaactgtaagagccgcagatgaacttttgatcccccactcgagatcatgtcgttcttctttttaaagtcacccctttcccactcatgtcaacggaagcagtatccttttctgtctttggtcagtggaatgcagtgtggccactctgttttaaaaagtcactatcaaagggaggatgtgcactcacctggtttccatgggtcccagagagaagcttcccctctctttttcctctccttggcctttgtttggtttaatgttttccgcatctcagacattctcatttctccgaagtccttcacagttgcaccgcattgcttagttttgggtctctgatgtttgatgtcatggagagaattttgagggaagagtgtgcagaaagaaacccattgaaagctcagggttttctttaaacttccagattcttttaaagcaagttcgaagtgtcatccttagtcatttattggttcatgttggccttgagagaatcagctgcattcttgctgtgctctgcagagcagccttccacccctgctcagcaggaggtactcaaaggccattgtaagggagaaggcaggctgctccccacagagcaggacaagcagaggccatgatgctggcaccacaccgaggacagcacaggagccttgggctgcttcttggcatcgagggcactccacagtgggagtctagtaaaagtggctgctcccttttcagtgtttcctgtagctctactttttcacacccaccctgccccacatagtccacctgcagcctggctgattcctaattatccttgaggtcttgtcgttagatatttcctctgagaggtctttcctgacacacacacacacacacacacacacacacacacacacacacacacacacgtcccatagcaccctgtacttcattcttactggccctcaccatgccgggtggcatgtgcatccttgctcatctctttggtgtccatgatggtgaggacctgtgtctgtttcattcgccagcccctgccacagaactggcacattctaggattcagtgaacacttggtgaaggagtgagtgaatggaagtgcctgttgcgtgtaggacctagtagccagcctaaatgagaagatttagccttgaggttattttagtacaatagggaagaccatcagtattcttggccatggaaataattcagggggaaaaaaagaaggttctgaagtgtataggaaaaggtataaattcaatacaagttgggaaattagcacctagataagactagagggtctggccctcagttttgtaggctcaaaaatgtttttttaatatacatagctgtcagttggaagcggattgacttaaattcacaagagctactttatgaataatcaaatggtgggttttggctgggcgccgtggctcatgctataatcccagcattttgggaggccaaggcaggaggatcacttgagtctaggagtttgagaccagcctgggcaacagtgagacctcatctctatgaaaaataaaattagccaggcgtagtggcgcatgcctatagtcccaaccactcgagaggctgagatgggaggatcgtttgggcctaggaggtcgaggctgtagtgaaccaaggttacgccactgcattccagcctgggcaacagagcaagaccccatctcgccagtcatgagtttcctaactagggaagaaaaatatgacctctctcccaagcaaacctgttgggaagcctgattaccaacagagcaggctgcttccctgttgtgtgtccctgcactttccagatcctgacctgcagcacgtggataatgactcatttatttactatttccccagaagatggtatgtctcatgaggacagggacttggtcctttttcctgctgtacactaggggctggcatggtcactgagtcactggtgcacggttggtgctcagtaatgtgtctgatggaagagggtgagatgatcagtgccagcggtggtgtcgtgtgctgcagcctgatgcagccctttccaccacacttgccccacagattatcattctgggaaggtctagagcttcctgttacatgttagaatgaaatgtttggactttgggaggccgaggcgggtggatcacttgaggccaggggtttgaaaccagcctggccaacatggtgaaactccatctctactgaaaaaaaaaaaacaaaacaccaaaattagccagcgtggtggcggacacctgtaattccagccactcgggagtctgaggcaggagaattgcttgaaccagggaggtgaaggttgcagtgagccaagatcgcaccactgtactccaacctgggcgacagaatgagactgtctcaaaaaaaaaaaaaagaaaagaaaagaaaaaaaaaatatttgggatcaggagtctgaaagtcagtaaaagcatgaattgagtgcctagtctatacagagccctttgctaggaacactgttactgggttggtcccttttgaagactccattttccaaaatgcactaaacattgcattcttcccagtgtaaacatgagtgagcccattgtagaaccgaaatcatcccaagggccagaattcagtggtgaatctctcagcatatatgagtccgattgagctctggataggaatgagggctgtgtctttggagcactccccacatgctcccacagaggaggggcctatcctgctcagggaggggatgttgtgtcagggtgacttcccggcagcactatgtagacttggtgattcagcccaaaggcacttgcaggactctaaacactgagggcctgagttggcagtagcagttaactggctcacgctgctgaaagccaaggctggcagggccacgattgagcctggcgcctagaagccatcatctggttcagaaatgggcccagtacattgttgttgctgttgacacaaaagcagccttgttgtgactccttacaaacccatccagactgatgggcctgggccagggccctgacagcactctttacaccaaccaggaggcaggaagccaaattactaaagataaatgtttgtcattcagtgacccaagggagatttaaatggatttccaaaacacgaaccaccttggatcccagtgattgtcctgaggttttgccatgaattggccctcagttaggggctaagggtagctggaaagacggtttgcagttgccaagcacagaatgttcttcagatagagggctcctagggacaggaggaatttgctctggttgagttttgaactgagccctttactgccccgagggggcaaagggtgaggctcacagctgtgctcttctttcaggcgaagtggtgaacacccatggccccgtggagcctgacaaggacaatatccgccaggagccctacaccctgccccagggcttcacctgggatgctttggacctgggcgatcgtggtgtggtgagtgggccctcagaaggttacacctgcgggtaggagccactttcacagtaagccctgcagtctcacctagactacgtttactcgagccctagagagctgagccaaggaggtctgaacagactcccgtctgtaacttcctggggcatggccaagactccacataaatagctcttagcttttctggcaggttggaagttaacctctgtaggtccccgatgtggatacctgtttttcatttattcttttttgttcattcatttcctcattttctttctagtctgtctcctgactggagcagctggggctgctaaatgaggccctgtcctcccctttccaccccggccacccagagccccttgttttgacctgagggatttatttcccttataaagaatgatgaaaatgtcgccgggcgtggtggctcacacctgtaatcccaccgttttgggaggctgaggcaggcggatcatgaggtcaggagtttgagaccagtctgaccaacataataaaaccccatttctactaaaaatacaaaaaattagccaggtgtggtggtgtacgcctgtatcccagctactcaggaggctgaggcaggagaatctcgtgaacctgggagggggatgttgtagtgaactgagatctcaccattgcactccagcccaggtgacagtgcgagactctttgtctcaaaaaaaaaaaaaagtcaacagaattttttttttttttgagatggagtctcgctctgttgcccaggctggagtgcagtgacaccatctcagttcactgcagtctctgcctcctgggttcaagcgattctcctgcctcagcctcccgagtagctgggattacaggtgagtgccaccacgcccagctaatttttatatttttagaaaagatggtgtttcaccatgttggccaggctggtttcgaactcctgacctcaggtgatctgcccatcttggcctcccaaagtgctgggattacaggcaatgagccactaggcctggcttttttttttttttttgagacagagtctggttctgttgcccaggctggagtgcagtggcgcgatcttggcttaccccaacctccaccttccaggttcaagtgattctcctgcctcagcctcccaggtagctgagattacaaccatctgtcaccatgcatggataatttttgtatttttagtagagatggggtttcactgtgttggccagtctggtctcgaactcctgacctcatgatccacccatctcggcctcccaaagtgctgggattacaggcatgagccactgcgcccagtcttttttttttttttgagatggagtcttgctctgttgctcagactggagtgcaatggcacaatcttggctcactgcaacgtccacctcctgtgttcaagcaattctcctgcctcagcctccccagtggctgggattacaggtgtctgtcaccacgccaggctaatttttttattttttagtagagatggggtttcaccacattggccaggctggtcttaaacttctgacctcaggtgatccgcccacctcagcctcccaaagtgctgggattacaggcttgagccaccacaccgggccaacagaattttttaataccaaagttgggccagcagatggagatagctgagaaggcagaaaaaggcctttgtggttgggtgtggtggctcacacctgtaattccaacaatttgggagtctaaggtgggaagatcgattgagcccaggagttcaaaatcaatcagccgggtcaatatagtgagactgcccccgctacaaaagaaaaaaatttaataattagccggacatggtagtatgccccagtagtctcagctacccaggaggctgaagtaggaggatcgcttgaaaccaggagttggaggctgcagtgagccatgatcacaccagtgcactccagcctgggtaacagagtgagactctatcttgaaaagaaaggaaaaaaggcctttgtttgggccagatggtaaaaaatcagacaaggtgggaaacagcagtgactctccgtggtaattccttgactagcttcgagagtcgtccctctatagcacttcacagaagttgagaccagtggctctccattgttgatggcgcagaatgatgaagtggttggttagttaggtggcattctcggtctgccactctaccacgtgatggctcagttttctactataactagggtgtttgctccaagagttcctaccatgccagggggcagaaggatttgtgagactccacgtcgtttttggtagtttgcttcatccttctgaaaagcctagagccccagggtattggagttggtctactacctggcagaatacctccaagtgagctgcttatttctttacagctaaaagaactgtacaccctcctgaatgagaactatgtggaagatgatgacaacatgttccgatttgattattccccggagtttcttttgtggtaagttgtgggggctttcttgaggttcttgagaggaaggcatagagcagatccaccagagggcaccagagttttcatccctgccaggggccaacctttgaatggcaaattagtgtgtcatttttgagttcctgcatctgaaggacacttgctttcattagcacttagaattgcagccttgtttaagacaattgactgggtgagggagaccttcgtagagctagtacccagggaagaggtattcattgtctggtgactttatataagaaaggaacgggcatgagacctactaagactgaaagaaaagaaggcacattttctatctagttcctgagcatgctcagttgtatagccttgcctggctgagccatccacctgcccaggccacgtttaatatccaggaagagagaggcatgggccgaaatggagagggactacctgaaagggaaggaagaatttgtaccagaaagagggagacaggacaccagagctccagggttgccacagtcagctctcaaccatgggacccactggcctccgaaccaaagatgccagtaccttggttcaagctgtcaaagtgaacacagaaattggatcaggcatgaaatcctcagtatgataaccttgggttggatgagtaactaggccaaatgggatgagcagccagaaatggtgatggctcgattctgtgtgtccaggagggcttggccctaaagagaatccagctattaaccctcagggaggtggtagcaccaggtccgaaccaaatttggctgtggagcccaagcggcttgtccagcctgccggcaagcagcacaaccaccccagcctctcttttccagggctctccggccacccggctggctcccccagtggcactgtggggttcgagtggtctcaagtcggaaattggttgggttcattagcgccatcccagcaaacatccatatctatgacacgtaagcacctgcacctacccccaccccccacaacaccgccatcctgcttggtctgggagagagtagaaaaaggctgcacaatgtgccccatgaaaggaagagggaaggtctcaggaagggaggatgcccaggtgcggggactgcagattcatcctaggaaccacctgttctgctcagagtcccagccagctcccttgtttgtggcccaggttggaaggagcccaccctgaggcctggtgtgcctgctcagcagaggcttgtttttgtttttgtttattattttttacattttatagaggcaaggtcttgctatgttgcccacgctagtctcaaactcctgagctcaagtgatccactcacctctgcctcccaagagtgttgggaatatagacgtgagccattgtgcctggccagaggcttttcttagtctcactctgttgcccgggctggagtgcagtggtgcgatcttggttcactgcaagctccacctccagggttcaaacgattctcctgcctcagcctcccaagtagctgggattacaggcatgcgccaccacacctggctaatcagaggctcatttttgaacgcctgtaccagtcacacatggaagcacttgaacagcagcagaaatgggccagagcgagtgtgacccagattcagatagtccttggggcctgtgatctctgctcttcattttccctggaagtgttgaaaccatctgcctgccacagtcttcagggcttattaccagctgtgttcttgagggaatcagaacccttgaaaccctagaattgccttgacctgccccgtgggttccctgtgctgcttccctgcatgctaaaggtgggattccccagccaactcctagggactcatcagggagatgctggtggtaccttcaaataaaggtgtttgcttgggtcccaccttcctttggaaatagattctgttgaagtgaggcaggctccttgcctggtggagtgtggtggggagtcccagtactgagtgcaggtggcagctaaaagtacacccgtgctgcagacctggtccttctaggtgtggctgcacgtgcttgatgggatcaccattcccttccctgttaaaaaccttgtcacctggatttttccccctcttagagagaagaagatggtagagatcaacttcctgtgtgtccacaagaagctgcgttccaagagggttgctccagttctgatccgagagatcaccaggcgggttcacctggagggcatcttccaagcagtttacactgccggggtggtactaccaaagcccgttggcacctgcaggtaaaactgtcttcctgtaaggccccaaaaatgcgggtgtctgcactgtagttgaggagcatgtgccactgtgagtcacagctccgcccttagcatcccacctctggcgtatctggtaaggcgggcacttggtgcctgcaggagccagatggggagcatggagagggcgggagggttgtagggatggcagattggcaagtccctgccttgtctggagggctcttggtgtctgctggctgctgccatttggagatggtggggggcggtactggtggtttgtttttgtttttagggatgagcccaaatctggatttttatgggaaatgtcctaaagttttaaatggttggctcaaattgttttgaatattgtgtgcaccaaatagagcaagtcagctatgtgatctaagggcaacctctgccttagaaagttgtttaaaacaattgaataatctctccttagagaactttaaaagtaaaaacaccaggtgtgaaagcagaaggggaggagggaggagggtgagtgcctctgccatcatcttctgggcatgactacagtccttttccgttgacttgattctaggagtgaggattggtctccccagacaaccgctgtagcaaaggaatagtttttgaaattgagcaagaaaaatagggagaaagaaaatccaggaggagctttggcagcactcactgtggggagggggaggctggagagcagggtgacaccactgactccggaggcacctgatgtgtctctcacgccacctgctggccagctggggtctccctgccattgtccttgtaatagggattggccagaaccctgaggacaggacatttgtgtccccacaggtattggcatcggtccctaaacccacggaagctgattgaagtgaagttctcccacctgagcagaaatatgaccatgcagcgcaccatgaagctctaccgactgccagaggccagtgctgccccgggtggtgggcagggggcagagagagggcaaggagagcctggctgtcagcaggagagaagggctctgggtggagagggagctttctcctactggaaaagcgaaccagcccatagtcttcagatttcctggactttctatttctgttatctgaagcaggattttattttagtttaactttctcagttcctctgagtctgtgcctggactagcttctctgccatctgttgaaaggctcagagaacacctattctctgtaattttagcctaagtaaagcataaatagaatgatgaatccacttagtgaaccttcatacacacggcagcgcgttccaaagcccagcgcagatgcactacagggtctgtgacgcccctctgccgggtcaggtaaagggtgacctgagcttgtgagggatccccgatttctaatcccaatttccccacccagatttggctgaaggactgggcaaccttaaagtgagctgcttttctgttctgggtctcagttttcctagtttcccaaagaaacaaatgctccaactgtggctggcttcaggtagggattcttttttttttgttttgagacagggtctcattctgttgcccaggctggagtgcagtggcacagtcacagctcactgcagcctcgacctcccagactcaactgattctcccacctcagcctcccaagtagctgggactacaggcgtgtgccgccatgcccggccaatttttgtttttatagaaacggggttttgctgccaggcgcagtggctcacgcctgtaatcccagcactttgggaggctgaggtgggcagatcacgagatcaggagatcaagaccatcctggctaacacggtgaaaccccgtctctagtaaaaatataaaaaattagccagtcgtggtgtggtgggtgcctgtagtcccagctacttgggaggctgaggcaggagaatggcatggacccgggaggtggagcttgcagtgagccaagatcacgtcattgcactccagcctaggcgacagagcgagactccgtctcaaaataaaagaagcctgggcgtggtggctcacgcctgtaatcccagcactttgggaggccaaggcaggcggatcacgaggtcaggagatcgagaccatcctggccaacacggtgaaaccctgtctctaataaaaatacaaaaaattagctggtcgtggcgtggcgggcacctgtagtcccagctacttgggaggctgaggcaggagaatggcatgaacctgggaggcggagcttgcagtgagccaagatcgcaccactgcactccaacctaggcaacagagcaagactccgtctcaaaaaaaaaaaaaaaaaaaaaaaaaaaaaaaaaagaaggccaggcgcggtggctcacacctgtaatcccagcactttgggaggcctaggcgagtggatcacgaggtcaggagatcgagaccatcctggctaacatggtgaaaccccgtctctactaaaaatacaaaaaaaaattagccgggcttggtggtgggcgcctgtagtcccagctactcgggaggctgaggcaggagaatggcgtgaacccgggaggcggagcttgcagtgagctgagatagcgccattgcactccagcctggcccacagagcgagactccatctcaaaaaaaacaacaacaacaaaaaaaggattttgccatgttgcccaggctcatctgaattcctgggctcaagtgatccacccacctcagcctctcaaagtgctgggattacaggcatgagccactgtgcccatcccagtagggattcttaaaatcccttctcaggtgggcggtggctcacgcctgtaatcccagcactttggcaggacaaggcgggtggatcacgaggtcaagagattgagaccatcctgccaacatggtgaaaccctgtctctactaaaaacacaaaaattagctgggtgtggtatgtgcctgtaatcccagctacttgggaagctgaggcagcagagttgcttgaacctgggaggcagaggttgcagcgagccgagatcgcaccattggactccagcctggcgacagagcaagactccgtcgcaaaaaaaaaaaaaaaaaaaaaaggaaagaaagaaaaaatctcttctctttcctcggagtgcttcttcctattggtcatcagtgcacacagtcactgcgttcctgctgacatgaggctgcctgcctggactcctcagcctctaaacaggattgatcactctgaaatcaggctaatccacctagtgattggggtcattagtgtcccatcttgagagactgctgcagtaccgttagacactgccaaaagcacaggcttgggggactgtggtatgtgtcttctcccttctgttctcatgacagatctgccttgcgttctaggccggtgggcaggcaggcagagagcattcttagagtgctgcagcagcagaagaatgtctcacccatgtctgggtggaaaccccagcatggctgtgttttcagtccaggatttgaggtatcattgtgggagctgccatgtagaatgaggtcattgagcgttcccctaaagagacgaggatttagcaaggaattttagaggctggaggttctagaactgaagttttaaaagcaattcctgcactgggaagcattgtgtcaggcactgactgaggcctgtaaactgtgacaccaccctgtttgcagattgccccaaggccacctttgtgtatctgagcctctggggatgttctaccagccccggtatttgctccacaggatcacatggtttcattccactgaagcatttttctagcaaaagcagctgccgggtgggacgctgactggggataaaatcctgggagtatgctgcttttcttctgaatgtaacccacagccgtgtctctctgggaagtactggtgtaatagtgtctgggtgggcagaccctggctgggccctggggtctgtccgcgaagtgctctaagtctagcagagaaagagcagtgagtgtgggatggcatcagtcacagttcagtgagaagcctgtgaggactgttgggctgcgtgggcagaaggtacagctagaaaggccaacctggcccaagggtagaaattcttgtcttctggggtggggagtttgaaacaagggtggagcatgaagggttgtgttttcttagggagtcagcctggggccatgtagatggttgattgatgtagcagtctgagtctgcctggactaggagggaaagggccagaagatacggaagaggcaggccctgtgcctgaggagatatgcacgggggtgcagggagccgccgaatgaccagggattctctcttgagggcctgatctgtccttgccatggatagatccagggtgatcagctcatctcactccatctcttctgtcttgcctccagactcccaagacagctgggctgcgaccaatggaaacaaaggacattccagtagtgcaccagctcctcaccaggtacttgaagcaatttcaccttacgcccgtcatgagccaggaggaggtggagcactggttctacccccaggagaatatcatcgacactttcgtggtggaggtgagtcagggagtggtgttccaggtctctaacacgttcccagagaggcacccccctgagtggccgggttcccagggctcgagtgttggcaccttagacttccttgaccatccgtgtttggtcctccctaaaaacagggagttggtgcttgaatttgctgaaaagatacctctggatctggcttgagcccttctccccctctgccccactttgataacacaaaatagagagaactgagccccgcttaatccttcaggaaagcctgcaattccctgcctgtcccagcttaacccagtgctgaccagacataggagacacagtctggggggatgtgagctgcaagaagaggtccctggcggtgcccatgctgggaaagaggtctggcaggttcagcccacgatcacggctctgtcctcaagtgccctgagccaatgtccctcctcctccccacatgtcctgttgcagtttccagccatttatctagaggggcagagctgcctgaaggtggagtgagagaaacattttgttcccgggccgcagtgccactgtgcatgcttgacattgcctctttattgccttcccttcagaacgcaaacggagaggtgacagatttcctgagcttttatacgctgccctccaccatcatgaaccatccaacccacaagagtctcaaagctgcttattctttctacaacgttcacacccagacccctcttctagacctcatgagcgacgcccttgtcctcgccaaaatggtgaggagcagacgggggggtctctggagatgtgcagggaagaggcagtggagccatggtgagcacagctcccgggacgcagcctcccatgggctggaggctctgagccctcctcatctgttctgcttaggcagggttcccgcagtttttaggcagaaactcaaaacttggagggaacaaggagcatccgaagtgaaggcattgaactcctcctgattcatttcagtgagtttcgttctcacaggaggcgccaccaaggagcctgaatagccaggccttccctgggaggacagggcttctcctcacagctttcccagcgtgggaaaggggtgattgctgtctgtcgtggtgagtcattggagcatccaactgccagtagcggatggcgagcccgtctgtcagtgctttgctgtgggttctggtaacctgtgcccagcccagcccagcctgctgtaggcaatctggtccctgccctgtgagagcttctgctccagttggtgaggtttaggaagcatcttcacagtctccaagcaacacagcaggtgtcatacaacatgaggtgcactgagggcctgagagttggggcatccatggagtaaggaagcaacacaaaccccatgtagctgaccagagccagcttctcagaggaatgggctcagggtttggactccagagaggactgtggaaattactagagtttcagggaggcataaccaggaatagcaagagccccggcctggacactgagtacatatgtgtacactctgagggacactgggcagaggccaggctggagggggcgctcagagtgtcctgagaaccacccggagagcggggattaacgtggaagcagcggagcttctgagggaaccttgttcttgtggctgcccacaggacagctttgaaatggcagcaaaggggtaggaaggaggctgtccccacctgtcctcacctgttcttgtttgtccctgctgctttgcagaaagggtttgatgtgttcaatgcactggatctcatggagaacaaaaccttcctggagaagctcaagtttggcataggggacggcaacctgcagtattacctttacaattggaaatgccccagcatgggggcagagaaggtaggcgacacatagccagagtccaggctgcccggcccagggtgtccatgtctccagcagaaaccgggccatgggttgaggagacagccgcagtctgggtccttgttacctcgagttgaacctttgaaaatgccctccctctgctggccagaccagcaggtcagcgttcccctctcagcaactggtgtgaggatggcagaggggacagagccacacagtagcacgaagatcatctccaatgaggccttcccacgtgagggaaccgtggaagttgagttgcccacggtttgccaggagggtagggctgggggaactctgaggaggtttcctctcctgagctgctgccctcttctggcatgacactttcttagcccttcctcccccagtgccacaggggacataggggtgagctggagcgtgggccagttttccctgggaggtctgatggacgtgtgaaccctggtgtggaggttgagtgtggggccggctgggtgtgagtctgctcccacagcacaggcggtggacccgggcccagccactcggaacttcagggatagggggtgtgggagagtctttgggccactgtcaactcagctctgcctctccctgttggctttcctaggttggactggtgctacaataaccagtcaccagtgcgattctggataaagccactgaaaattcgaaccaggaaatggaaccccaccactgttggtccaattttcacacacgtgagaatccctggcaaagggagcagaactgaaccggctttaccaaaccgccagcgaacttgacaattgtattgcgatggcgtgggctgcgtgacgtcacctccggtcgtgtctctggtctccgtgttttccagttaattacatcctcatgcagccgtgatcaagggaatgtaactgctgaaaactagctcgtgattggcatataatggagttaacgggtgaataataaaagtatatatatatattatatatatataaatattttaaatatctttcatgttccaaatgtacaaggatgtttggtctttaatgaaaagctgaatccagatcattcctcagaatgaggacccgaggacagtggcagacagacgcgttggcacagttcatggtttcctccagaggagacattggcttatcatggggaaaaagaggatctggagaacctcatccagctccccttctgaatcagctgggatgactggctttgagaaggaagggaagatggaacaggctcagatctcatgggatagcacgtggagctcttggctggggctgaccctgggcagggactttcctgcagggccagacctgcctgcattctgagacaaagcaatggacggtccgcagaagcagacctcattgattgagtcctttcttccatccccttggcctgctccctgtaggaagtcatcctgccaactgatttaaaagggctctttagccagttgttgccaaccttatagggatgagtcccctgtgagattttgcttttccactgcctgggatgatgcagtttgaagaggcccttggacctccttgtaacatcagggacctttggagaccattatcagtgtaagccctgcttagctcatcttagagcaaagagccagcaccctgatgtccctggggtggctaggcaggagtggcgtggggccaatacccagaccccttcagccaccagcccctggcctgtgccttccaacccattagccatttcttgttgtgcccctttccaagatacagcctgcaagtggtagcaagaagtgattagaggcagatctggacttggcaacagaagtggtttcccatctccattgtctgagtctgattttcgctgatgctgttttgtggatttttgtggtagtgatggttgtcagtgctgccagtttcccaaaacgtaatcaagcctctggtcacatggctgtcgatgtaggcattctggagtggtgttcagccaagtgaccgggcaaaattgggctgtgaaattgtacttccaggcttggatgtaatttttgctctagagagaagcaagtggtgggaaggaggtagcatgacgtgtggtgtgcgggtttccttgctgccgtcacctctccgctcatacaggaatgaagccttagccaggaggccaggctcagccctgtgccactcaccgaagccactttctacaggccagcaggggcttgttgcaggctgtgggttttggtgtggtttgtcagaggctaattctgcagagtttccaaaaccagaagacatcgtatgcttgggatgggggccgtgccacccgtgggaatgctgcccgctctgcagactgctgctagagccagcaactccactaaggtggattttcatcaggggcctgcagggccctcccttttcccattgttcctgcgctgcaaattgcaggccccagcaatcgtgactgacgtttgctccttgactccaagaaactgagaccaaagaagctgctgttcttagcaagatgcgcactgcattccacaggtgggaggagtcggagaggcaggggcttgctttgcagccccacagacaacagttgcacagtgcctcaagccccagagtggctcaccctgtccagacctttgaggatatcaaaggacaaagtgcccaagtctttcctaccttgggggaacctggaacttggaaaggctccctgtcctagtcttgatctgttctgggccaggtcccagcttgagctgcctctgagatttgggctgtgcggatctctggagtgagctctgtttcggttgacccaggtcatggaatggaaacggtgaggccccagtggctgttctggaagaaacagatctcctggcaaaggccccagcatctccctcactgaaaccaggtggccggctcctcggactctgctttatgttgcggtgagaactctgcccaggtgtgcagggtttggcttgtgggctgcttgctgctcatctgatttttgtcccagtagtccctgcgttcttcattcaaccccttctgggacttcagctcagagagcaccatcccgggggtcagggcctccccacaggagccctgcagtgtggtagcgccatggctgtctcaaaccaagcaaaggaaggaccctgaggccttcacgctaaccgtcctcgagcaactgctgttggaaggcctccctgggcctggcccccaccctctgccacccagtcctcccagctgccatgtttcaaagacgacctttacctcctgcctttggattgactctgcatttgaccacggactccagtctgtgtgtagggagagagctgagtaggaggcctccactccggatcgaggcctgtatagggctcgtttccccacacatgcctatttctgaagaggcttctgtcttatttgaaggccagcccacacccagctactttaacaccaggtttatggaaaatgtcaggccttccccacaactcctgtctaactgctgtcgcccccctacttgctggctctcagaagcctaggggagtccctgtggtcctgaattctttccccaaagacgaccagcatttaaccaacctaagggcccaaaggccttggacaactgcatggagctgcactctaggagaaggaggggaaccagatgttagatcaggggagggagcaggagtgtccctcccgtcagtgcctacccacctgtgaggcagccttctgatggcctggcccaccttccccagaaccaggggaggcctgaggcttcagttttactctgctgcaaaatgaaggcgggcctgcaagccgactacacctacggaggctgttgaggacaatttcattccattaaattaaaaaatactgactggctggcaggcaggtgccatgtctgggaacagggacgggggagcttcacctttttgtcttggcttttctttgggctgtgggggggcatccatttccagggtcggggaggaaataccaaatgcattgttgttctgctcaatacatctcacttgtttctaataaagaaagcagctgaacaaaaccttctgtcctggtattcctggtcagcaggtggcagtggaagaaatggagtgctggagcctaggctggagccaggacgacagggcttggacacaaagtccctcaagcccacagcaccaggccagcttccaaaggccttcctttaaggctgcccttcttccagggcaaacttggtgttgtcagacccttcccacccgccagagacgagctgctattgacccaggttcactccaagttagagcagcaactgggctctcagccagcacctgagcacctcagcacaggagccggcccaggcttccctagctgggcacagagcagcccccttggtccaggtcagcagtggctcctctggtggaggtgcaggccccgtgccttcccactgtgcccaggtgccacatctctcctcctgcaccactggccgggtggttctttgagtcactaggggtgcattttaacatggcaagttgctgggccccagtagctgtgtttaagacttcccattccccctcttctcatcctctggaacttacccattccctgaccccctgatcctttcaggtccatgactggtgcctccaagcccctttccagggaaactgagaggacacaggacctgcctgacccctctaaagccccccaaccctcctgtcccaaaccaagtcactcaggctcctatggcccatgccttttttcctgcccttagctttgggctgagagaacatagccctatgtgttgtttctacccatgggcctctgggataaaaagctgtgatttcaggctgggcatggtggctcacgcctgtaatcccagcactttgggagggcgaggcgggtggatcacgaggtcaggagatcgagaccatcctggctaacactatgaaaccctgtctctactaaaaacacaaaaaaattagccgggcatggtggtgggcgcctgtagtcccagctacttgggaagctgaggcaggagaatggtgtgaacccgggaggcggagcttgcagtgagccaaggtcgtgccactgcactctagcctaggcgacagagcgagactccatctcaaaaaaacaaacaaaaaaaaaaccctgtgatttctcccttgcttctgcttcccagttcacttccttaaagactcttgcccttttggctgggtgcagtggctcacgcctgtaatcccagcactttgggaggtcaaggcgggtggatcacctgaggtcaggagttcgagaccagcctggccaacatggtgaaaccccgtctctactaaaaatacaaaaattagctgggtatggtggcgggcgcctgtaatcccagctactccggaggctgaggcaagagaatcgcttgaacccgggaggcagaggttgcagtgagccgagatcacgccatcgcactccatcctgggggacgagcaagactttgtctcaaaagaaaaaaaaaaaagactcttgccctttcaaggcagccttctcagtattgggccctcatcctagccttcaccccttcctcttggtaccagatacgaaaccagagaagccaagcaggatgggcactcagccctgggtctggtgctcacctgacccagaccccccagccagcccctggccagacctggctctgcaggggctgggcaatgctaatggctcttcatttgctaaaactggacttagcctcactgtgcctcccatcctgaggctgcagtttggcagcctgaccctctgacagccctgagtgccagatgcccgggctgcctggcccggcccgcctggctcggcccattccttctgggcccttttgattctgattatcctctttcagacacacaaattaaccagagccaaacgccactcccagcatgaaggagcgggggacactgccactttctgcattagttcttggagttgctagaaggtggagtctgccccagccctgtgttttggtttctgtggggcttggggccagttcaaggcctatcccagcccagttccaggccaccctctggggactaatgtcaagttctgcccttgtccagtgccggcactgttggctggcagaacctaaaacaccaggcctccacatttcaccctgctggcaggggcgggtgcaggattttctccagattctgtcgcctagtgtccagtgcgctctcctggcatttctatagaggcggcccaagcagcgtttccagcctttgtgtaaaaggctggctggctggaggaagggaagcccgtgtccttgggatttgccctactgagcagacaggggccttgagcccagccaagcctggagagtggcagtctgagggtccctcagactcctgtctcctcctcattcaaggcccctctgtgtatgtgtgagtgtgtgtgtgtgtgtgtgtgtgtgtgtgttgtggggaggcgctgacctgctgaattggcatcctcagacagtcttgtgatactcgcagcagctttaagccaggagcagggatcgggctatttagagctgtggcatctcctgctgccaccccctggctgtcttagccaagtccatgccctgttgaggggagaggcccaagaaactcatccagccctgtccctcctcatgggcctgtgggggtggcagcatagaggtgctcagggagtggcggtggtgaaatcaacgtgcttctttattttttaaactagataggctcattctactgtcttctccagggctcttctatgaaacagttacaaacctacggccaggccaggcagtggctcacacctgtaatcccagcactttggaatgctggggcaggaggatcacttgaggtcaggagctcgagaccagcctgggcaacatagggagacccccgccccccccgccatctctacataaaatttaaacattagccaggtttggtggcctgtgcctgtagtcccagctactcaggaggctgagatgggaggatcgcttgagcctgggagttcaaagctgcagtgagccatgattgcaacattgcactccagcctgggcgacggagcgagaccctgtctcaaaaaataaaaaccaaaacctactgccagtttccccagggcttcatgcctcagcgctcccttcttgctttgagaagggaaggggagctcaggttccggagctggagggaggagtccaggaaggcctggggtaaaggagggcttaggggctaagctcggggtcggggccaagtggagtgactgcgctcctctgggggaaggaggctgggatggcccacgggaggacagaggggaactgagggcccacaagtgtcctgctccccaagtctcctggcagcaacaggcttgctcctcataagtcacaatgaggggtgggctgaggacaagaggagctggggccatctcagggccccagggttggagctcactgaagtcacatgaacacctttctgttcttcaggaggggcccaggcagccctcagcacccaggtgagaccagcgcctggtgaatgggctgagtgggccaagtgggtgggctggggggctggtactcccaccacctgactccagaggaggagagggctctgcaggggatgtggactggcactcgcagaaccccaaggcgagtgaggtgggccctcaggagcgctggatgcggatttggatgaagagcgtggctggtgacagtgaggccccgtccttggaaagcaggtgtatgtggcggtaccctgtagggaggacagccaggcctcaggtcctctgtgcaccctgggggtctggcccagcccgggcctgcttcagggcaggaaattcgaggcacaaaggtgaacagggtctgcaggacctggacccacatccctctccatccccaccagcctccaccaaccttgctttaggctgctaagaggcagtgtaaactggcccacaaagtcattgggggaggtggcgtcataatcttccaccacaaaccggaccagtgccagctccggagcccgcagctggaactgcagggtctgcccccagcgggggttgaagcctagggcacagggatggcagtcagagcccaggggccccaggacccaccctgcaccacccttcgctctctgcagtctcccccaaccccacttccgccagtggctgcccaccattgttgagcacgtagtcagtctcctgccgggcacagtctgcgggcaccccatggatctcaatgcgcaccagggggtccacaatggagtgtggcttctcggcattcagcttgggcagctgctgtgcagtcagcacctgtgggtgagggagggagtggctggggcccacgcccaccttggccatcccctcatgggcctcaagctcacaccaccctcacttccaaatgtccccagcctcccttgccttcctccacctcacaaagagcctttctagaaccagtctgaccccacactggggcccgttccagcctgctgacctggatgctgagagtggttctgggaggtcctgggtactcggggtcaaaggtcgagtcaggttgccgcaggcaggcaggttttaggacgtagccacactgcccattgactaggaagcgcccggcattgaggtccatctcgtagcctggcgtctggaagttcaaggccactgtggacacagcagggtcagagcaggggctcttagcggccctgttctcactactcagtttcaggggactgcattcctctctacaaagggcctggggtcccactgtctgcttagtgctgctctgctcccaccatgactttaggggagggggtcatggacccagcccccactgtcacctgtacttctgccctgggatccctcaagactggggtgggaggtactaaaaaagcccccaccctcagggccaggcttgggtcagagccaggggtctgaggaagcctggggtttccatccttaccccaaggagacgatacagccctcctttggtggggctcagcgtcccccagagcccacccttgtcagtgttgacttagtgggactgccaggtgtgtgggggttgtgtgtgtccgggggacatgggagtggagattttaatttctaccatgataaaaatgcgagacctgtacactgtcaagaacaaacgagcctgatttgattttcccacctacattgctggcaactttaaaaataatcaacaaaatgcgtgtttccaccgtctggaaggctgtgtgggcccctcactgctgaggcctcccccacactgtggcaccccgcctgctctcattcctgtggcccccacttacccagctgacagcccgagttccacatctcctggggactgtagttggctgagttcatccgcagccccagcgggtacacgcgggtcagctggcgggcattgtgcctgacaaagctgttccctggggcagagttggggtgagaccgtgacagactccgggggtccctcacccaaagccccggcctgtaacctccagggaacagagcccaagcccgtccccaggtcaccctgcccccgctcctcactctcttctgacctagagtgagaggggagctcactgaggaggctgcagggaccccctccagccacacagcctggccctgcatccccagcccccaattcccagctcctgacaaagttccaaccaagtacactgaatgcccacggccctccagctccactgtggttcctggaattcttctccaggccaaggccccaggccttcaacaacctgttcctcctgtctggaaagcgctctcccctcttcacctggctgcttcctagtcctccaggtgatgtgtcctctcagcatcacctgccccaggaattcctccccagtgttgcagcagctgctgggctcccccagcccccagcccagcctgacccatcaccctctatggccggccccaccacagggctctgaaggcagacagcaggccgccctcagcgtgccactcccctccatccaccctggcatgtgcggggccctcattccctcagcccagcccctctttggggtcctcttgacctctttactgtcccccaaagccccctcaactcctttccagactcccttcaggaggtctctcaccctctcgcccccagacacccagtgccccagctcctacctgcctcccgaatgagtttcttggctttgcgctcgctgagggagctgacctggcagggttgtggggcgttgggggcagggtgcagggtccgcaggcgggtggcgtggcagtacacagccagggccgacagctccggggagatctgcttggcctaggagaccaggctcagcggggttcagctggcccccgcttcccacatccgtcctcccaccttcccccccttccccaccccacccatcccagctctcaccagccgcctctgcgctgcagcctccacctcctcttcttcctcctcgtcatcctcctcctcctcctcccgatccgacagagcccggccatcctcgctccgagcagcgggcaacttctttcccttcaccaggacccggcccttcagctgctgtgggggccaacgtggaggatgaagggttaggccttctcgcccctgtggcagccagtcagtcagttattcaaccaccgccttgtgaggggctggctaggggtgggaggcaggaaaggagacacagagatgagcgatgtttctaataggaaagagtggagaatggcccgggaggccatcaggaagggatgcttaataaggtccctcaacatcagaatatacacagcagccactacaatgcacgcgacagctcaggactgaaaggaaagggaccctcttcaaagaagatcttacgtggaagaagtgaggctacaacctggaatcacatgtccttttttggtaccatttaaaagagaagacagtacacatatgtacacaggtaatgtgtgtggggaaattcttgaaggacatgcaagaaagttagagatggttacttcttgtgaaagaggacaggtcagtggagggaggggagcactgctcatcgcgtcccttagtacagctcagttttcttttaccatacgggtgtgattttcacagtaataacaaaaatcacatctcacacacacacgagggtgagtcaaccctgcctgcatgttggggattggaagtaggaggagagttttctcaaggagcccgacaggataaatgtctggagagagccgaggacgcgctctggtgtctgggggagagcaggaggccgcctcaggcccgagagttggggaagtggataaggccacaggaagaggcggctgaagttgagctgaattctaagcaggtgacgcttggcaagtgtggatggccgagaagggacttccaggtggagaaagtgtcaagcggggccttgcaggtgggaatggcagagcctgcaggactctacgggcagggacacagggccagcagggcaaagccaggttacagaagagggtgtgtgtgtgggggggtctagtcaagaatggagagccagagggcagcagaaggacaagaccaggggatggcagacctcagatgaacagaggaacagagaaaagttaaggcagcaagaggtgaggggtcctgagccacagaggtggcacgagcagtgcggggaggcggactcccaccagacctccctccacccaggctaggggctggggggcgtcacctctggggatggcagctcctcgggatttggggagtccagcgcctgtgtcaccagcatgtcccccaggatggtgcagaggtggcgggccatggcagcctgctgctccagcccgcagtggttctccagggataggatgacagggtaaggggacagctgtggggggaagggcagcagctcagagccactcccctccctctgccagtatctcccaacatctggctcccagacccttcaggacaggcaggcaaaggcagggctctggagaacccagggaagcagcagactgtccaggaggctgagggcggctgcaggaattattttttttttctttgagatggagtgttgctctgtcgcccatgctggagtatagtggtgcaatctcagctcactacaattccatctcccgggttcaagcgattctccctgcctcagcctcctaagtagctgggattacaggcgcccgccaccacacccggctaatttttgtatttttaatagagatgaggtttcaccatgttggccaggctggtctcaaactcctgacctcaggtgatctgcccacctcagcctcccaaagtgctgggattacaggtgagagccaccacgcctggccgattttttgttgttgttgtctatgctttggtctctctccatcacccaggctgaagtgcagtggcacagtcagtctccctgtgttctccagtcctgggctcaagtgatccccccacctcagcctcctgagtaactcagcctacaggcacatgcccccacactcagctaatttttatttttgttgagacaggatgtagctatttgctcaggctggtctggaattcctggcctcaagtgatcctcgcgtcagcctcccagagtgctgggaatacgggtgtgagccaccgcacctggtcccataaatgctttttacatgtgaatgacattgactatgtcagtgatgtgaaaactctcctcccatcatttgctgatgggaagatttgcacactgtgaccaaagttgcagtgtttatgcagatgccactggtgagcttctcttacagcttatttattctttggaagtcatgattaaaatgtccttccctcccccaaaggttttcttctggaaactctgtgatttttaggacatttcccaaatatgagagagggaacatatttcccaaatatgagggtggcatctcattcagctttatgccaccccattggccacttatcccagcagcacttggtgaatgaatgattctctgggcaagggtttcctctggaaggacggagggcagctggcatgtgagtgcggacggaggtcattgggaaggctgtggggctggggctgggcatcccaggggctcaccgtgaaggcatggtcgcgcacggcttggaccacgtcccggaagagaatcttggaggtgagggtatggccatgatagatgacgggctcccctcctggcccctcccagcagtccagctccacgcagcggcatccctgggcaaaggccctgtgtgtggacagatgggtggacgggcaaggtgttgccagagtgccacagagcagggcagcaggcaggctgggccaggaaggccccaggaagccagcccatgtctctccccaggtggggctcccggaaacattcaccccctgctacagtacctaacataggcctcggtgctgctgggccccccgatctgggagtcagtcagataggtgttgtgggaggaagagatgaagtagtgggcaaggggctggttcatgtcctggaacacacacgtgtgggtgttgtccaaggcagccccctccggcgacaacaggtacatcatgaagccatccagtgtcatcagctcatgctgcttggctgcaggggtggcaggagagggcatcaggccacatagggatcccccatgtccagcttccaatgcccccaaggcccactcagcttaggaataatgactagacaatctactgactagactccatgtaagtcatgccacttaaccttcgaccagaccctgggaggaagacaaactgttgtgccattttacacatgtggaagctgagtctggaggaggtgaggtaacctgcccgagatgatgcccgcgccagcccgcagcagaacccgcttagctgggaacacagccctttcaggtgccacgacctggccgtgccaccccccccacctgtctcgttgagctcataggtctgaatgagctgctgggcgcgggccagtgtggcgccctcctcgccctggtcctccaggaactccagcagctcaggggcactcagcacgcggtcctcgcccgagtactgatggaagatctcctccagctccggccgcttcagcagccgccgcaggaactcctcgatctcagccccctctagacggtcgttgttggagtggtcacactcctggggagcagcaggagaagctcagaggaggcagacactccaggaaacctggcccctttgacccatctgtcatctaccacatctgagaaggcaatggtccccatttcacaggtggaaaaacagagtaagacttgtgactctagctcacacagctggtaaattacagggcaggattttttggtttgttttttaggtttgtttgtttgtttggtcttgctctgttacccaggctggagcgcagtggcatgatcatagctcactgcagcttccaacgcgtgatctcaagtgatcctcccacctcagccttccaaatagctggacagctgggaccactggtgtgcaccactgcacctggctaatttttgtattttttgtagagatggggtcttgctgtgttgcccaagctgatctcaaactcctggcttcaagcaatcctcccgcctaggcctctcaaagtgctgggatgacaggggtgagccactgagcctggccggcagggctggacttaaaaggtctctctggttcagtgcctgcccctctgcaccatgacctaccccaggaatcaagatgtggaaggaaaaatggtgaccctgggccaagacagggcccttgggccctcacactcccctaggtggacacgttactatcctgacatgcacatattcacacccagcatcattgaacaagtcaatgagaattcatggagcatccctgtgaagctgtggcccaggggtccagctgccatgggctctcctgtctttcggggtcacaggtgggtcccaccatccacatgcacacagaggtctgccatgggctccagctgggccatagctgcagagcccactcctgtgtgcccctgtgctcccatgcatgaggtgccaacacgtgccacagtggagggtctgcgtggagaagggtgcacacgtgtatccgtgcacatgcacacctgtaggctggctcctgcctgtgcccccacgtgcaaaaggtgccttgcagactcagggaaatgaaaacagctttgctgctcactttggaggggtaggaactgaggatgaggaaagttctgggccccggctccccactcccttcctggcccagtggcctcaggggaggcaaaaggctaactaaccccagatgttgcctttgtgcagggaaaggctgctcgctccaaaaaagctgcaggtggagagggcaggggagctgatgattcagatggctgggggcaggcagaggtcagagtgatggcagagccaggggctggggttcagggcggaagcccaccttgaagaggaggtaggcgtacatgtcgttcatgtccacgttgaccattctcagcaggctcttgatctccttgaagctcatcttgctgtcctggttggagtcagcccggtgcagataggagtggatccaggtgtgggtgctcaggaaataacagcaacacgccaggctgcccccagccctcaggtaactggctggtaagtcacccccacctgggtctgggggatccccagtttaggggctgtactttccccttggcctgtgcactccccgagcacggtagcagtgtctcctccgcaggactggggcttaccaaagacaggaggccctgtcttcaccctcagaaggcctcaggcctccctgaaggaggcgccgcgccacccctcctggtgggagcttgggcctagccagggcgcgtgtccccaccctcagtttcgaagaccaagggctccgacccagaccgtgcgccctcaggacagggccctgccttccctgggcgtgggggctctccaaggatggggctctccaaggttagggctctccaaggatggggccctccctcccagccccggcaggatattggtctagccgctcgcgctggctcatggcgtccaggcgcgcgcggagcttggtcagaccgcgcacccagcgctgcgcttcctcagccgtgggcgccgccaggtccaggttcttgcggcggcccttgaaggcgatggtgaggcagcgcgctggcgcgaaggcacccccgaagcgccgcaggccctcggactggtggccctcgcggaccgcctcgatgtgctgcacgaagactgagaggagggccgggtcagggcggaggaccgggcctgtccccacctccctgtccgcccggcgctccccggcctctcacagatgtgctgcgatggcgcacgcgggatgcgccgctggaaccacacgctcaggccgtcctcctgcagccggtacagccgctccttgtgccacgtgcgcgagcggatcttgcggagccgggagccccgcagcatggcgcgcacgtcctcgtcctccgtcaggcctggcggggcgggaggacccggggcgtcaggccgtacctgcccagaggctcccctgccctcccccgctaggacctgctgccccatcctccagcctctccaaacccaggccttcatcccacagtaagcttccctccccctcacaggactcccctcctccccgattgtaagaagcctcctgcactgggtttggctttaggctttggagccctaaacgccccccaacccgtaccccatctccctccttccttccaagcagcggcctctgcagtccctcagtgtggaactgccctcggacaatgcctgggactcaggcctcactaaaggttgccctttctggcagggcgcggtggctcacgcctataatctcagcacttgggaggccgaggtgggtggatcacttgaggtcgggagttcgagaccagcctggccaacatggtgcaaccccacctctactaaaaatacaaaattagctgggtgtggtggcacatgcctgtaatcccagctacttaggaggctgaggttgccatgagccaagattgtgccactgcactgcagcctaagcgacagagtgagactgcgtcttaacaaaaaaaaaaaaaaattgccttttctgccactatcccccaccacatggcttccagccttcaagtccagaatttgccaccaacagcctttttcccttgatgtgaaaccgtagccatcaggaaggtctcaccatctaacctagatctctcttgctgtaacccaagcaccttgcctctgctttcccaaagacaaggaggacagcagaggccaccctggctccagggtcacaggccaaggactccaggatcagccctgcccagctgatctccaggcatgggaggctgaggcatgagaatcacttgaatccgggaggcggaggttgcagtgagccaagattgcgccactgcactccagcttgggcaacagagtgagactctgtctctaaaaaataaataaataaaagcatctcctgtgtgcaggccctgctcatgtactaatagacaaggaaactgaggctcagggaagcttaagtaagttgtcagaattccatactggtagaagccactttgggctctggaggtcggggtccagcgcctctgacctttggccctgcactgcacggctcttctagtgcttctaaattccgaagtctggggagtaagtctcaacactgtcacttcccagttatttaatacatggccccagtggcactaacctgtcactaagcctcatgttctccatccataaaatggagaccacaatcatacctgctgcaaaatccaaaattcagaggtttctacagcgtgaccgacactgtgccccggagagtttcggccctctcctggctctggccccctggaacacgtgatgcccagcccaaacagtgccacaccctgctctacaatgcctcaacgagagtcacaaccaaagatttttgagtcagaggacaatagaggaggtgggaactgggtaaacggagagtccatggcctttggaggtggggcacagcccggagtgaatgagggcccagagtttccagagaaccgaatatagatctgtgtgtgaagcctccagatattctaatgttgacaacgaaatcaaattgaaaaaaaataaaaatcaataacccctgtgtgggccaaaagaagtaagacagagggcctctcttcctccctttatttcgacaagcccctaatactgggtttggctttgtgaccccaaggccctggcttgcccaattgcaaattctgacctaaggaattgagtctatatctctggaccatctcctctcaccctctcttggacccttttgtaggatccttctcccttctcttcctcctatctgagtccttgaaggaccagttcagatatcacctcctccaggaacccttccttgatttgtcctcaagtggacattctccctctctgaccactaacagcactttttgctttaattaaaataaaacacaaaacccacctatatactttaataaatctgagggcggaatgaggtcttatctcctcaccacagtgctcatcccagagccaggataccagctagtgttgactgaaggggcagacaggtagacggacagatggggggactaagtgaattctatccccagctctgccccatctgtccagagttcaggacagaggcctcgcagggcagaggcctcgcaggtcagggtttctcaaccttagctgtgcatcggaattacccaggggaggctgcagacaccacagcccagggcatctcacccagctggtgtgggatggggcctgggcatctgtatttttaaaacccactttgaccatgactgaaaatcagggtctcaggggcaagaggagaaatccacctccttaagaggccatgaccccttggggccagcctgtggccctaacagctccagagggtccctcagggtctagactgtggccctctgagtgaatgcccactcggtaccccctggtcaggaaggggaaagtggaaccctcctctttccagacaaagagctgggtgtacacggcacgtgccaggccgaggggctcaccagaccccccccccaaccaggtccaggtagcctctaaatggtcccatcctgagcaatgacacggtgagggcagaggggagcctgcagcgccactacacttaggcacatcctcctacacccccttggccatgggaagggggactgctcattgccatgacaaccaggctctgcagctggggctgcctcccctacctaggccagccctctgatgccaagcccatgggtgtgggggagatgagtgactaaggccggaaatgggggtgagtcaccggggcctgctctgtccagagccttctgcaaacaggccatcaacacaggcagcctgaacgcctgactgggcccccacttgggcaggctcccaatggagggggcccctacttctggccccttaccctcagctccccaggaacctgttgggggaaggggtgacattccaggctgccccgcaaactggcactgccccccaaacacacacccagtggaaaagccaaacagaaggagggtgcagtcccaggcggggccaggtgctgagtccctggttgggtgcttctgtgtccccactgctcgtgcttctgaaccctggggcagtgagaggactggggtgtccagcaggaagggcagggccaacagaggtaaggaggcaaggtcagagggagggctcagggccagggcagcgatgctgcgaggaccgtggctctccatccagccacccagtagacatttataggtcctgccaggcccaagcccacagatgtcgccttgaccttgttcctacctgctctgagcaggtgcacaagccgcccacctcctactgttcctgtggggtttgtatctacttgaaccatctctgccttgatcctgtagctgccgggccagtgactgagtgggtggagacaatcacaaaataatagcagtgaaaatgagggcaaacgaaagccaaaaggtggaaacaacccgagtgctcatcaacagatgagcctgtaatcccagcactttgggaggccaaggcaggcgggtcatttgaggtcaggagttcaagaccagcctgaccaatatggtgaaaccctgtctctacaaaaaataaaaaacattagctgggcatggtggctcacacctgtaatcccagtactttggaaggccgaagcaggcagatcatttgaggtcaggagttcaagaccagcctgaccaacatggtgaaaccctgtttctgtttaaaatataaaacatcagccgggcatggtggctcacacctgcaatcccagcactttgggaggctgaggcatgtggatcatttgaggcaaggagttcgagaccagcctaaccaacatggtgaaaccctgtctctactaaaaacataaaacattagctgggcatggtggctcacacctgtaatcccagcactttgggaggccgaggcaggcagatcatttgaggtcaggagttcgagaccagcctgaccaacatggtgaaaccccgtctctactaaaaatagaaaacagccgagcatggtggcccacgcctgtaatctcagctactagggaggctaaggcaggagaatgcttgaacccggaaggcagaggttgcagcgagctgagattgtgccactatactccagcctgggagacatggcgagactccgtctcaaaaaacaaaacaaaacaaaacaaacaaaaaacatatgagacagatgagtgcataagcaaaatatggtttatcgatacaatggaatagtattcagccatgtaaaggagtgaaatctgatgcacgctacaacatggatgaaccttgaaaacatcatgctaagtgaaagaagccagaccccaaacgacaaatactatgtgattccacccatgtgaggtacccagagcggcaagttcatagagacagaaagtagctgggagggtaccaggggctggaatggggaggtaatggagagttattgcttgatggttagtttctgtttggatgatgaaaaagttttggaaataggcaacagtaatagttgcacaacagcgtgaatgtaattaatgccagtgaattaaccacttaaaaatggttgcaatggccaatttcattatatatattttaccatattttttttttttttttgagatggagtctcgctctgttgcccaggctggagtgcagtagcacgaacttggctcactgcaagctccgcctcctgggttcacgccattctcctgcctcagcctcctgagtagctaggactgcaggtgcccgccaccacacctggctaattttttttgtattttttagtagagacggggtttcaccgtgttagccaggatggtcttgatatcctgacctcatgatccgcccacctcagcctcccaaagtgctgggattacaggcatgagccactgcgcccagcctattttttttttttttttttttttttgagacagcatctcgttctgttgcccaggctggagtgcagtggcacgatctcagctcactgcaacccccacctcccgggttcaagtgatttccggctaattgttgtatttttagtagagatggggtttcaccatgttggccaggctggtctcgaactcctgacttcaagtgatccactcgcctcggcctcccaaagtgctaggattacaggcgtgagccacagcacccggcctattttaccataatttttaaagtttaatgatataatatgctggaaaccattgtatactttttttttttttctgagacagggtcttgctctgtagccaggctggggtgcagtggcacaataatggctcactgcagcagcctcaaactcttgggctcaaacaatccacctacctcagcctcccgaggagctgggactacagacttgcactaccaggcctgaataatttttaaatttttttgtagagttggggtcacactatgatgcccaggctggtctcaaactcctggcctcaagtgattcaacagcctctgcctcccaaagtgctccgcactgtgtactttcaatggataaattataaggtatgtgaatgaatatctcaaaaatgctgttaaagaagcagacagccaggtcggcacccggtggggctgaaatgtggtggaagttgggggagtctgaccccaaagggctgtgtgtggccacaacaggcacaagcacatggagcctggtttaggcctggcccatagtgggtgctcagtaaatgatcacaaagaaggaaactgaggcagggctctggggaagtgagttagtgccccgggtggaaagaggcacccacgtgttctgatccatctgtccccttagtcccatggcctccagggggtaccttccccagaccaggacagcggcacctcccgcccaattcagtgttgtcagctggggctcagacaccttcccaagctgcccgcttatctcagcctcagagaggggtcaggcgtgctgaggaaagggcaggcccagtttctcaacttccacctgcagcccgggcggtttggggcgtggatggtctggggcctgagcagttctgtaagggtagccaagaccagggaccagaaactacctcatgtcagagctggaaggggccccaaatcccacccttttcacaggtgcaccactgagctcagagaggacaagccctgtgtgctgaagatagtgcaggtcgcccccaggcagggatggatatagaggctgtgcagtggagacaggcgccagggcagctggcagggagggtgggagttctgtccaggcgtgtcccggaggggtggcatgcaggcagggcagggtgtgtgtggggtgtatgcataggtggggagtgtgtgtgtgcgtgagacagtgtgtgtgtatgagtgtgagtgaatgtgtgtgagtgtgtgcgtgtgagtgtgtgtgtgcgtacagggttcatgggtggagagggtggaaggtgggccagccagggggaaataggcggctcgcactcgggaggtgcacacagggctccacaggaatgcgagtcatgcagggaactgctacagccagcagctgtggccaaggccgagcagggagtagagaaagagcgtttccaggtggccggggctgtgaggctctaggagaggacacacaatggcgaggggtcccaaagaccctcccaccctaatcctttagccagcaggcagcctccacacctcaggcaccaagcatgtcccccgtgacccagctggctgccacacccagggctggagcctggcgggggctcggtgccagagtccataacattccttggagaatcaacaaagtcaggaaaggcaggcggtgcttcccttggccccgggtgggacacagcaagtgggggtggcagcacccttttctctggggccagaacaggcatgaaacctggttgggtgcggaagtcagggtaggggacagggaaagatgtgagggggaccacagggcctggcagagccagccccctagtcccacctggcatgcccctgcttagactggagggccacccagcttacccaccacccaggccaggcacctgccagggctgggggttgttctgaagaccctcacctgccaagtcacccacagcagtcccactcaccctgcggaagacatcccaggcaggccatgggccgagccctctcgctcaggggcacttggtagtgtgtgtaggctggggaggcaagggggcaggattctgcccactcaggcctctgcccatggggaggatgaggggcaggggcggagcatcagggcacaggcacacacggggctgtggggacacagggtggccagagaaaatccaggacacccgttaaatgtgaaattcagataaagaataattttttagtataaatacattccatattccgcatttagcggaattccaaacttaaccgggtgttctgtattttatttggcagccctgtgaggacgctcctgggggctggcagggcccccatgggagaggagcggccaggaggccccctgcaggtatcagcttctctatcagtcactgtgtgacaagcacggactctgggccacactgcctgggttcaaattttctctcagctacttcccagctttgaaccctaggcaagttaccaaatctctctgagtcttagtttcctcatctgtaagagaaggctactggtaccacctacctcatattagtgtgagcattacatgagataatatgcgaaaagcgcctgggacagtgacaaaattgttcattagtattcatcaggctagccaagaatggtggcttacacctgtaatcccagcactttgggaatccaaggcaggaggattcttttagcccaggagttcaagaccagcctggacaacacagtgagaccccaactctacaaaaaacagaaacaaaattagctggatgtggtggtacccagtctcccagtctcctgagtcccagctacttgggagactgaggtgggaggatcacttgaggtcaggaatttgaggttgcagtgagccatgatcatgccactgcactccagcctgggtgacagaatgagaccctgtctcataaacaactaacaacaacagcaacaacaaaaagtattcactgggagccatcatggaaaactaggctctggcagcaggcaggcatgtggccttgggcggtgatttcacccctccgccttgagcttcccgtctgtaatgtgacatgaggacagcacctcccgcacagggatgcctgaggattaagcaggatcaggtctgatgcaagctcagcacagtgcctcacgcatggcgggtgctcactgggctctagcgctcctctctcttcaatgattccctgcaagtccgcagcccagcccaggagcgggggactggaggggggacaaaggactcccactcactgtgggggtgttttcttcctccttccccgctcatctgggtctccctagtgtggccctaaaggattttccttcctcaggcccctctaagccactccctgccctagtcccttgacctgatttgatataaaatctattctctgttaggctaaggggtgtggtgatggcaggggcagagcgaggcgggggaggctacctgggtgacaggcctaggccttggcctctgatggcccaaggggctgggccccaagactgggtttccttctccaccctgtccctggactccctatggcctggggaagggacattcccaacagactcggactcaacattcctctctctgcagtcactcagcaggacagggcagtggtgaggaatgagggtgacctagatgacattctgatatctatgtagttcccgagagtgtcaccttgatgaggtgcccagagctcccgtgcagccttactcagctgatgagtaccgaggcccgggctcagctgtaattatttgtctgcatgtgactctgcccactaaactgtgcactccctgagggcaaagctctgtgctactcatctctgtagccccagcccctggcacagcaccctggcccactaatggcgctcagcaaacgtgtgggatgaagaggccaatgggcatggggcctcccctcagcccttccgcggcacccgtgaccctgccagggctgactcccagggctgccctcagccatccccaaaccacaccatttcttagcccagagaatgacacctgtcgatcacagagtccagcccagtctatctcctgggagttctggggtccatcctgggtgtcccccaagtctggtccccaccccttgcccaactaactcctcagcctccctccttgggtctccctgtttcgcccctgccttcatccaacctgccccccactctccacactcactcctgcccaagccctttctggggctcctgatgccctccagataaagtccatgactctccagggagggcctggaggagctcctcccacccccagcctctcccctttgccactcccgtcttcctcagctggggccagccagggcctgctggctccccagcccctcatgtgctgccccctgttcccccacccccaaggtcctgttcctttgtttcactgtctgatctccctgctggaacctcagctctctaatgcaagagccccagggtggagcataccataggcactccacaagtgcttgtaccatagtaccataccatgggcaccgcataagtgcttgtccaatgcatgcacagttgaatggatggcagggtagagatggtgtcctatgtctcagtaaccagagtgccaggcacagcgcccagacatagtcagcgctcaggtggaatgagtcgaggtaacaagaaggcaaaactggcaatcaggacccctgaattctgccccaagttctacacggggtccctggcagccttgtccttctgttccggagttccacacctagcctctccatcactgactattctaccaatggcaggtccaacgcagcacttcagtggcgcggtcctttccacgtcagacaacattctcgcacacaccctctcattcaagccctccactgccctgcgggtcccacttttcccagactctgagagggtaccagggcccatgtggtggggcaccaccggggtgccagtcacactttgccctttgttggctgtgtggtcataggcaaattccttgccgtctctgagtcagtttcctcacttgtgaaatgaggattcacctcccacctaggaagtcgaggaagattgcaagacaccacctgtgtaacccacccagtgccagctgcctctgtgatgttccaatgagccacagttacattccttctccacgactgacttccccaaatctgaggtgagagccttggctgtcggacgtaggctgttagaccagtcctgccagagcagtgtggctgtggccgcctctgtggggccgcggcttggagggctgctgtggaggccagcctcttctgcggaggccgaccgcaaactcgcatccttcctaagggctgccaagaccccgagacaccctggcagaacctagatactgctggggagccggacgagggacaccccaagcctccctctcccgctccattctccttggagaccccaccagcgccccgtgcccgaattcgcgcttcagacgccccgcgagcgccccctggtgggaagcaaagaacaccctgggcgcccggctcgccccgggaccctcggatgaccccaggtgcgacccccagctggagggagctggccctccgcccctagccatagcctcccagccccgtgcagcctggggaatccacgaactgctccctggagcgccccagactgggcctctgggaacggtccgcgcccaccccaccgccccttgcccgtcactgacccatcttcttcagcgcccgcagcccgggcctcttggtgccgccatcggagggagtcggcggggacgggagagcgaccggcgccgcgacttgggctgcgacctgggcggccaccgggggctcctcgggcgggcggcggcaacgcctccagcggccgcacagcatggcttggcggggggccggggccgggcccggggtctgcacgcggggacagggcagcggggcgccgctctggcccggccccggctctgagcgaggcggcgagcgaagaaacttagcggcgcgggagggagtcggaggaggcagcaggaggtggggcggggcggggcgggaagggaagggggcggggccggggcggtgcgagggcggggccaggcggtggcctggaagcccggagcctcagcgctcgcccctgctcgtgagtccgtctccccttagtccgggcgagcctctgatcttggccgcaagggtgactagagcccccatgctgcggggctgggggtgggagccggcaccggggacgagggccatcctctggcacagacaccctctccttcccgggggccctgactcgaggctgacgcaggaccccctcctccttcccttccgcgtccccgtcgcgccgcaggcctcagcagggaaccagagccgggacaggacgcagggccgggagcgaaggcagaaccccgggagctgagccgctcggggcagcgcgaacccgaagggatgggcatgggggtggggaggttggcagtgacgtcataggattaacctccctgtgccaggccaggtgctgccccctcggagagccacagtctcggagctgacggacctggggagcgtgaggcggagccgagcctggagtccccagcaactggttctgggttcgaggcttggacaggccggcaccccagcccggcacccgcggtgtagttgtccgcgacgtcaacccgtgggtgggcatccgtgtgcaggttctggtggccgagtcgggtgtgcacttactatttatatgcaagcaccagagtgcgtgcgcgaagtgggggacgtccaggtggcagcgtttctgcggccggtggcctgggtccggcagagacatgggcgcacaccgccactttgcggcggccagcggcgtggcatcctacagagaggctagtgctcagggcctgatttgccacctacttgccctgctctaccccatcctcagatctcccaggcccagagattctgcacactggcttgggtccctacgccactctggggtcctgaattttctttttttttttttttttttttttttttttgagacggagtctcgctccgtcgcccaggctggagtgcagtggcgggatctcggctcactgcaagctccgcctcccgggttcacgccattctcctgcctcagcctcccaagtagctgggactacaggcgcccgccactacgcccggctaattttttgtatttttagtagagacggggtttcaccgttttagccgggatggtctcgatctcctgacctcgtgatccgcccgcctcggcctcccaaagtgctgggattacaggcgtgagccaccgcgcccggccctgaattttcttcttgattatcgtattcgcctttgtgcttttgatcctgccgttccttcctccagaaacaaccttccttattctcctggtttacccttttgttattcttgttgttggataggctaagtctacatttcttttaattgttatggacacttaatagttgcagagaattatggagaggcatgtaatgttttgatacaggtataaaatgtgtaatgatcaaatcaaggtaattgaagtaaccatcacctcaagcatttatcattcctttgtattaggaacattccaattccgcttttagttatttgtatttgtattttatttgtttattagagacaaggtctcactacttggttgcccagggtggagtgcagtggcatgatcatagctcactgcagcctcaaagcaattctcttgccttggcctcccaaagtgttgggactacaggcctgagccaccacttcccgcccagttattttgaaatatacaataaattggccggatgcggtggctcacgcctgtaatcccagcactttgggaggcagaggtgggatgatcacttgaggccaggtattgaatgaagaccagcctgggcaacataatgagacttctgcctctacaaaaattgtttttaaaataattaatttaaaaagatacaataggccgggcgcggtggctcacgcctgtaatcccaacactttgggaggccgaggtcggcggatcacgaggtcaggagatcgagaccatcctggctaatatggtgaaaccccgtctctactaaaaaatacaaaaaattagctgggcgtggtggcgagcgcctgtaatcccagttgctcgggaggctgaggcaggagaatggcgtgaacccgggaggcggagattgcagtgagccgagatcacgccactgcactccagcccgggagagagtgagactccgtctcaaaaaaataaataaataaaataaaataaacaaaataaaaagatacaataaattattggtaactataatcgttgtattgtgctaccgaacactggatctcattcattctaactgtatttttgtacccatttccccccctccccagtacccttcccagcctctggtaaccatcattctgcgatgtccattttgcttactctttttttttttttgagatggagtctcactctcgcccaggctggagtgcagtggggcaatcttggctcactgcaatctccacctcccgggttcaagcgattctcctgcctcagcctcccgtgtagctgggattacaggcgcgcgccaccacgcccggctaatttgtgtatttttagtagagatggggtttcactatgttggcccggctggtctcgaactcctgacctcaggtgatccgcccgccttggcctcccaaagttctgggattacaggcatgagccaccgtgcccgaccatcttccaaaactgagctgtgatgtccttcctctagaacacctgaccacaggacatgactttttttaatccccagtgcctaagtgtctagagagctgagtgggttgcctcggatcggccaggcctggatatcagcgaacagatgcggatttccaccagggggcgctaggacgccacgacctttcactatgtgcaccagggggcgctgccgcccgccttggccatcccgggctgggaagtccgacccttcgattaagccccgcctgattgggaaaggctctgagaaactatttgcatgatcttgaaagagctgtgctgaatggttgaggtaggtaagccgaatgtgaaacaggctctctcattggcctaaattccccccctcgatctgcgtcgccatcccggccctgctggaccccggggtcagtaggaagccgcggggtggtggcgagagaggacccaggtgtcctggcagtgggcgccgcggggcacacgctgggccaaggtgcaggcggccagggtgggagactgttcgccccgccctgagtactcctatcttgtttctccacctgttcgggagttggagatgtgcacctaaaggaggcgcatctggggacggacacatctggcactgaggccctcgccacctgcctcgccacctggcgaccctgaccccaccacactgccttgaggtaggaaaaggaggctcctcaaccacaacttctgacctcccagggtgtctgaggcctctaaagagcttagtttgcccctctgggaagtgaatccttggcttatggtgccggggggaccctggaggccccctcacacgaaggctgcttcttgcagagtcgctcaaaagtagggccccagggctcgcagcagcatgggcaccgagaaagaaagcccagagcccgactgccagaaacagttccaggctgcagtgagcgtcatccagaacctgcccaagaacggtgaggctgcggggactcgcatttggactcgcattcaggacgcctggggtctgactctgaagaaagaatggtcctgatcactgcagtttttgcagacaagcccctgcctgggctgtcctgggggttccctccgcttcctatcctagtccagatgccctgggtgggacccatcaccacctctgccctttccaagcagggttctcccgcccctccgccccttggagctgggagtgatgctttgccctggcttcccaactctctgcccaggttcttaccgcccctcctatgaagagatgctgcgattctacagttactacaagcaggccaccatggggccctgcctggtcccccggcccgggttctgggaccccattggacgatataagtggtgagctccctgctggctgggcagacaagcctcagctgtcaagcagccctctcacagccctctgcccccagggacgcctggaacagtctgggcaagatgagcagggaggaggccatgtctgcctacatcactgaaatgaaactggtggcacagaaggtaagggctgcaggttctctgtccccaggctcctggccaggtggcctcacccttccagttctgacccccactacgtttcctacacatggaccccctcatgggaatcaccaccttcatgttacccccaaccctgcctatctttggcccctgactgggcacagggtggaggtgtgtgacagggcaggagcagggaggaagggacaggaggccactccgtccccaacagaccccctcccctacaggtgatcgacacagtgcccctgggtgaggtggcagaggacatgtttggttacttcgagcccctgtaccaggtgatccctgacatgccgaggcccccagagaccttcctgagaagggtcacaggtcagactcccaggctgggagctccaaaagtgctgagtgaaccgtcttaggtctaggctgaggtgggctgggggcagagggctccaggcgacatccctgttagggcccccaagcccccgagaggtggatcccaggcagcatccacggctcatcacgagtaggggcttgatcacactgggaggtgccagcctctccccaggcccacctctgggtgctgtgtcttggcaggttggaaagagcaggttgtgaatggagatgttggggctgtttcagagcctccctgcctccccaaggaaccggcacccccaagcccaggttagtgcttgagcaggaggggtggaccaaactcaggctgggggagggctggaggggagaaggctggatgccacgctgtgccctccacagacactgagacttcctgtgctcccaaaggtggggaccggggtctaggattcctgttccagggccttgcttctggcgcccatctgtgcctcaggtgttgatatctctagtgcctcgtatctctagtgtctcctaaacaggtgcttctgcccagtgcacactcctgctctccctccacagcttccctctgggcagtaactctaccaacccctccacagagtcccattcacccagggacctggactccgaggttttctgtgattccctggagcagctggagcctgagctggtgagcccagtccccattccccccttttcccaccccactgtgctcccactcccaccctcagctctctgactcatctcagcaggtttggacagagcagcgggcagcatctggaggaaagcgtgatcccaggaacagccccgtgccccccacaaagaaaggtgagctcctacccaacctctcacccacttctgccctttcccgtggtcctggcaccccaggctttctcttggctgccttcctagggcagagttgaaagtccattgctgggcactgagcgagaagcctctgtccaggaagggctgccaaccagccagatacctgcctggatgggcaaagtccccgccctccctcctctccccaaagggcacccaggagtctgcaccctctgcaggtcctgagtaaggccagcgggatgggagtcctagcccagttctcccacctacagctgcacagcctcaggaagtcatccatattctctggactcccccgtttggaaatctcagaagacaatgagttctgccctcttcccttctagaactcctgttgtgtgtcaggtcctgtatggacattttgaaaagtttctccttttttcctctgagcaagcagccctgtgagagaaatgacatcttctcctaatttttagatgacaaaatgatgcccagagaagttaatgactttggccgggcacgatggctcacgcctgtaatcccagcactttgggaggccaaggcaggcagatcacctgaggtcaggagtttgagaccagcctggccaacatggtgaaaccctgtctgtattaaaaatacaaatattagccgggtgtggtgggcacctataatcccaggtattcgggaggctgaggcaggagaatcgcttgaatccaggaggcggaggttgcagtgagccgaggtcattgtgccactgcactccagcctgggcaacagagcaagactgtctaaaaaaaaaaaaaaaaaggtaatgacttgatctgtgtcataagcggccatgctgggattaaacccatagcagcccattactcagctacatagatggactttgcaagaatcacacttggtacagcgactgggttccactcctacactttcctgggcttgccccagcctgcccccaccctgcccagagctgaattgcctcctgagcccccttccctgtgtgtctgtgctccgcagaggggttgcggggcagcccgccggggccccaggagttggacgtgtggctgctggggacagttcgagcactacaggagagcatgcaggaggtgcaggcgagggtgcagagcctggagagcatgccccggccccctgagcaggtagagtcccccaccccataggacaagatgatggcagaatccggtctttattctgggctcctcttccagccacttttgtttttgtcctcacgcctccacctgcccacatctctctccagagaatggcatggctcctgctacaggcaggaggtgggggtgagggtggagggggctgacatgcttctactctgaaggcacagtgggtggggccctttgccgttctcccctccctctgcctggagagaagctaagcctcaggactaatcccgtgtgggaagggccatgatgtgtctgctctgggcattgaggatgcgggtccctattgcccctcagtcaggacttccattcccagaattaggatttgccccaaatggttcagcccttgcatccctctcctcaactcctagctctgcttgcctctgacacttgggatcctgggctcctgcaaactaaataacagctgccattgctggagccccgctgggtgcgaaacactcatgggcatcttcccactgaatccacacaacagccctatgagatagagtttcttttcacctcccttttagagagggaaactaaagctccaaggggctaatttgcctgagggcacacagcctgggagagcctctctgagctactgtgaggattcaaccatgcatgttggtgcttcagtggtgcccaccaaacagaaagccttctccagtcggttctgttgctactattgctgttaatattaacattaagcgatggagttggcagtggcccctattctgtctccctgcaaagctggtacccaccattaactctgagtgggtctgttcttgaaaagcctgaggtagtgggggcagagagggctgggttcccagatgtgaggcatctctggggtgaccgctaatccactcagcacagcaggtgtgagcccacagcagcaggatttcctcagatccacgatggctaacttttcaacactgctcctccccctcaacagggctttctttcttttcttctgtttttttttttttctttttgttttttgtttttgagatagagtcttgctctgtcgcccaggctgaagtacagtggcatgatctcggctcactgcaacctccgcctcccgggttcaagtgattctcctgcctcagcctccggagtagctgggactacaggcagcaccaccatgcccagatactttttgtatttttagtagagacggggtttcaccacggtccccaggatggtatcaatctcttgacctcgtaatccacctgcctcagcctcccaaagtgctgggattacaggtgtgagccaccacgcctggcccccttttctttttttcctaccatttactacttttaaatgttgaagattttaaagtagattacaggccagcgtggtggctcacacctgtaatcccagcactttgggaggctgaggagggaggatctcttgagcctgggagttcgagaccagcctaggcaacatagcaagatcctgcctcaaaaaaaaaaaaaaagattctaaacatcatgatgttccaccccgaaagagttgggttcatattctcaaaataggctgggcgtggtggctcacgcctgtaatcctagcactttgggaggccaaggcgtgtggatcacctgaggtcaggagttccagaccagcctggccaacatggcaaaaccccgtctctactaaaaatacaaaacttagctgggcgaggtggcaggcacctgtaatcccagctactcaggaggctgaggcaggagaatcacttgaaactggcaggcagaggttgcagtgagctgagatggtgccattgcactccagcctgagctacagagcaagactccatctcaaaaacaaacaaacaaaaaaccatatctctcaaaataagaacattctacctagcccaaacaacattttattacacacaattattaatttcttaatatcatcaaatatccaatctaaattccagtttctccagttatcctgaaaccgccttttccagctgctctgtttttccaggctaggaccacacattgcatttgttcccctttcaattctcttttaatctagcccagtccttctccttgctattgacttgctgaccagtctgggctggtgtcctatagaatgttccaccttttgggtctaattacatcctcatgggtggttcctcgatacacatttcctgtgaactggaggttagatctaaacacttgattagagtcacattaaacatttgggctgggcatggtggctcacgcctgtaatcccagcactttgggaggctgaggcaggcagatcgcttgagcccaggagcttgagaccagtctgggtaacatagtgagaccctgtctccacaaaatatatgtttaaaaattagctgggtgtggactgaagcaggaggatcacttgagcccaggagattgaggctgcagtgaactatgatggtgtcactgcactccagcttgggtgacagagtgagaccctgtctcaaaaaaacgcaaagcacaaaaaaccacaacattttggaccagactacatcagaggtgatgttttttcatggcagaggacacatgctatctggatgtcccattattagtaactctagcatggaccactggcatggttgaagggggtctgatcccaccattgtaaagtcatgttttcctcctgcagtcggagaatatccagtcccccatcaactccatttgctagtttttgacaattgctaatccttgcctgagtcaataatttagtaattgccaaaaaaaaaaaagctgacttttaaatgctatgattcctttaacatctactagctatcagctatcatttgtatactctttccttcatcatcttgggtttccctgaaatacagtggaaaggcaagataaatacttcattctttctctttagttatctatttttaaagtaagaaattaatttaggctgggtacggtggctcacgcctgtaatcctagcactttgggaggctgaggtgggtggatcacccgaggtcaggagttcgagaccagcctgaccaacatggtgaaaccctgtgtcttctaaaaatacaaaaattagctaggcatggtggcaggtttctgtaatcccagctactcaggaggctgatgcgggagaatcgcttgaacccaggaggcggaggttgcactgagccgagatcacgccattgcactctagcctgggagacagagcaagactcctcaaaaaaaaaaaaaaaaaaaaaaaaaaaaaagaaagaaagaaagaaaaagaaagaaattaatttaaaagccacctaaatggtgacaaaaattccagttttctcttgagtatcactgtgggctcatggatttcacagattcagtattcccaggagccacagtaattctttttttttttttttttttgagatgcagtctcactctgtcggtcagactggagtgaagtggcgtgaactcagctcactgcaacctccgcctccccgggttcaagcaattctctgcctcagcctcccgagtagctgggattacaggcgcccaccaccatgcccggctaattttttttgtatttttagtagagacggggtttcaccatcttggccacgctggtcttgaactcctgacctcgtgaccacctgcctcggcctcccaaagtgctgggatgacaggcgtgagccatcccacccggtctgccacagtcattcttttttatgctcagacagtcacaactttggccattcaagaccctttcataccggatcttatgttcttataacacgacctgatgaatctttaaaagcgaccttgctttcctggtacaaggcgccccacattcactcccaccttccctgccccaggcctggaaccagccacttctccaaggagccttggctcctttttagtggagaatgatacttggaaactaaaatctaggtacccagggtcctcatttgacatatgtggcacatccttaacaacacaggtcttcaggtcataccaagggtcattgctttgtggcccagagaagatggcatggaagccgctccctctacccgcagccccgccagcctctcttgatactgggattgccctggggaggaagatgtgggagggagttggcattcaacctgtcaggaccacctgggggccacttcctttctagtggtgcagacttaggggcagggtctttccaatcttccactgaattggaagcaggttcctagggaggctgtgctgaggcctggactggcctctgactccctccctcttggctgcagaggccgcagcccaggcccagtgctcggccatggccccttgggctcccggggcccgcgctgctcttcttcctcctgtggcccttcgtcgtccagtggctcttccgaatgtttcggacccaaaagaggtgactgtcagtggaggggtctctgcagccaactgagactatcttgctgtgccctgagccttcctagggtttagaagaacagcattcaaaattccccgtcctgtcagtgtttgccttcgcacctcctcccctaaagcagcgcggggggcaaataagaccccacccctccctgcagcttcacagggacgcttccttccctccccgcaaccaccccaggctcccctgggaggctgcagttgtggtacacgtccccggtgctgggttggccgtgactcgggggcggggcgatcgggtctcagcccctgccttccccagtctctgggtcacccgaattttcccacccctgcttctccccgaggaggttgagctcttgagcaagttgggacttgggccggggcctggaagaatgattggctgggaggccgcgggagggaggccaggaggcccggaccagttgggaggagtgagcaggccccgggggagggggatgagcgcagtttgctcgctttcctcccctgccggccccctccgcccccacacacactcgggacgtcttcattgaagattcacttacaaaggaatgtttcactaaataaaagaaaaccagaatcttctgctgtctggtcccctacggagggagcggggagcggggcccggcgcgagcgaggcacaagtccctttcctgctccccacccaatgcccccctgatggccctgaaagaagccagcggttggtgtttctgaatggggaatattttccctcctccccgggcaagcgaagggaaaacaggcctctgtgtggaggggagagggaggggaaccaagggtggcccgggctgggagcggggcgcccttgggaaggcggggccaatgcggggggccgagggcgcggcccagcccgccgccccgtcggggacgcggggtccgagcgagctgggggtggcggggaggagcggagcacggctgggcggggccgaggagctggtttggcccccgcccaaagcggaccgcggctgctccagctccgcgccccgggcgtagagatggggttccgagcccccggccccagaaatgtccgctgccccctcctcagctgcctcagttcccggtgccccaccttgacctccgggcctgggccttcccaggggattttctgggaggccaaggcccagcgagagcctcgtcctcgccccgccctgagtagggagcagggccctgcgcgcctggaagcccctgtcggggtgggccgagcgcccgcgtgcagtcgccgtcggggggtacgggccagaagccttggcctccctctgtccagcacaagccctgtcgtccgtgggccgtcttggctcaagcctcggtccggcctgtattcagtggcgaaactggccgctctgagggccgcctggtgccagcgcctccaagtccactggccagggtctctaccgcagtcccccgccgctgccaccacctgggccctaggaccttcctacccctgggtaaggaagaggcagttctgaaggcccctggctgagatccttaaactcctgagttccctgtcagcctctagtctcgaccaccgtcccaggcttcgccatcattggccccactggaagccacagtcactctttagtcgtcagtcctctcaaagccgggaaggcatccctgaggctagacggtgcgctctgcacctgcacggctcagcccagggtcacaagcacaggctgaatagcccctgtgataaggctggactgcagcaagcaggacagacaacagcagggccaccttggtgggggatgcaggcctggagctgaagccagctccaccacttgcacagtagctgtggaacttgggtaagatattttttttttttttttttttttgagaccgagtctcgctttgttgtcaggctggagtgcagtggcgcgatctcggctcattgcaacctccgcctcccagattcaagcgattctcctgcctcagcctcccggaagtagctgggactacaggcgggggccaccacgcccggctaattttttgtatttttagtagagatggggtttcaccatgttagccaggatggtctcgatctcctgacctcgtgatccgcccacctcggcctcccaaagtgctaggattacaggcgtgagccaccgcgcccggcccccttggggaagattcttaactgctctggccttgggtggcctcttttgtgaaatagagttgatctctttttcataaggcagtcctggggtttaccagtgatggggcatgttaaatgcctggcaaagggttagaacccagctaacagtaaggttgcctggccccttgacagaattctagaattccacaacctattcgtcagtccacctctcccccaatagaacacgagaccatacagtggagcccagtccaggacactgaggctaggctcagcagtgccttccaaatgccctgactgggggtaccccagaatcctctggagtctgaagatggggtaacaatttggaggtctctgtgataactctctgtgataaccaagttatctgcaaaatccctttttcctccaggagtgctctgaggggcagttcttgctctcaggaagcctcctaagggatgaagccacacggagtggcgaacttttcaggtggacccgaattcttggaagcccagagaaaacaaatgaaggtgttcattttcagaacatatagctgtgcccagaggcccgcgtgcttgcggctccccttagaggcatctacattggccatgcccatcaccactggcccccacccccgatatctcacactgcccagagccaccgaagtcccagactagccctttcctggcacatgatgcttgggcttcctaaaatgcccctcttcgtgccactttgcctgaaagctcttcatccttcagagccagccaggaagtcacttgctcctgacacttgtccataattcccagctcccatgcactcggctcatcagctcccaccaggatttccctcacttgccatttaggctggctgtggtctgatggcctctccacagtccaggagcaacttgaaggcaagaatggcatcccacccctctttgtaccctcctgtttgccaagtgatataggggctgaataaggttgaagttgttgggaataaaaagaacgaaatccagagtattccccgattttaagaaaaaatgggttttgtgtttgtgacagaaagaaaaatggcacggggggggtcacaaagaccagcgctctagccagaactgccccatggttgtcatgtgaccttggacaagtcacttattttccagtgtcttagagatgccttatctgtaaaatggagacactcattcctatcgtgtctaacttgccaggctgtggtgaggtcacatggctctgtgcgtaaaaggtacacagtgcaaacgtgctggaatgtcagggatgctattaaggaagcaataagaagaaagggtcactgggtgtgtggcgaaggagaagtggaaagggcgccaagattttaggcctcagtgactggtatggagggttctctgggtcctctcagtccctgtttatggagggctgggggcttgggtctagagaatttctctctgagaaactacgcccccgggggaatcggcccccccagccctgcgccagaatcccctgcagcaagtttcggagcaaggcctcctccatgcttccctcccagtcttgcccagcgcccactgatgaggaagggcctctgcgggtgagacctgcttccctctcggatagccagggctgatgatttcaactcattaatcattccgaactcttcccaacaaacagcctcatggctgtcccggacctcctctgtcccggctcaggaaatgatctcggtcggaagtgaaaagaccaaatcggccccaggaggccattttcttcgacagaagctgaggcgtgggggcgtggccttcccccgcttccccctccactcccccgcccgcccccggccccggctttccgatctcggcccagggaagagccttggtcgcgaatcaccagtttgcatttgcccctggggcgggggcggctttctgagaccaggctggggctgggactccgccaccttcagctaagggtaccgaggtcagtccgggagtcgcgtcaccgggactcgaacccgcctcttcgtcttccgaggcctagtgcgagcctgcggcgctaaacgcagtcacactgtccctttaaggcggcactttttattcttcatttgtttacttcttcatgcgctcttcggtctttacaaaatgtgctcgcgatatccttccgcaagtgtcagtctcaggcactcaccacccgccttgaagccatttctataatcttaagactcgcgagttagcagccgtgggccgacgtctctctttataggatttaattcttttacattttagggactactttttaggaataaaccattcttgcgttagttaataaaggttcataaccttcggaacccctccgctgagaacaaaatacgataatagcctttataacgcaccttttcataaaaatattctgtgaggactctcataggccatcgaatcttctcgtattcctgaaacagaatggtacggtccagaacccgccccatcttctctgcgattggccgtccttcctcagcgagtcgtgtgatttttcaccaatggccgctcgcgtttctttagcgaggtctaagcgatggaaggtggcggccagggagacgccccctacgcgtcctgggattggctacgtcgcacggcgcgcgagggcggcgggcccgaaagataagaactacgactcccggcgccccgcaaagggaactccgttacgcatgcgcacgggcggggcgaaaaagcttctatataaaaggggcgcagaggactgggagacagcagttggaagttggcaggtggagaggcaggttgggagggaaagtcgggggaggacgcggaagaggagctgtgggaagggggaggagggagggaggaaaagaggaggaggcggaggagaactgagcagagcagagcatcgagccaaaggggagatgagtttgtctgtcctctgctgaggctacggccgggcctagggaactgggagcttgggtggaagcgacacccgtggaagtgggaggaggtggcgccgggactttaaccccttgtgggctctgcggcaggggatttaaccctttgtggatctggcccctcggaggcagcgtcatcggtagttttaaccccttcggggctgggtttcacgcactggacttaccctcatcaccttgctcaccaactcctttattggggtgctccgcttggaggtttgaggcccacctccgcccattacgtactgttcctgccgctgcacccccttggacccgctagctggccgcactgtgggcgcttaaccctttactgacttgagctccccagattgcagttggagtttgctgatagaaggactagctaaaggcgtcactgcaggaattacaaactgaagaggactctgttggactgttttttttttctttttcttttttttaagaaaaacccatttttttccttaaggacttactagccaaaatttcttaaacttcgaggactctactagccatggccgagccattcttgtcagaatatcaacaccagcctcaaactagcaactgtacaggtgctgctgctgtccaggaagagctgaaccctgagcgccccccaggcgcggaggagcgggtgcccgaggaggacagtaggtggcaatcgagagcgttcccccagttgggtggccgtccggggccggagggggaagggagcctggaatcccaaccacctcccttgcagacccaggcctgtccagaatctagctgcctgagagagggcgagaagggccagaatggggacgactcgtccgctggcggcgacttcccgccgccggcagaagtggaaccgacgcccgaggccgagctgctcgcccagccttgtcatgactccgaggccagtaagttgggggctcctgccgcagggggcgaagaggagtggggacagcagcagagacagctggggaagaaaaaacataggagacgcccgtccaagaagaagcggcattggaaaccgtactacaagctgacctgggaagagaagaaaaagttcgacgagaaacagagccttcgagcttcaaggatccgagccgagatgttcgccaagggccagccggtcgcgccctataacaccacgcagttcctcatggatgatcacgaccaggaggagccggatctcaaaaccggcctgtactccaagcgggccgccgccaaatccgacgacaccagcgatgacgacttcatggaagaagggggtgaggaggatgggggcagcgatgggatgggaggggacggcagcgagtttctgcagcgggacttctcggagacgtacgagcggtaccacacggagagcctgcagaacatgagcaagcaggagctcatcaaggagtacctggaactggagaagtgcctctcgcgcatggaggacgagaacaaccggctgcggctggagagcaagcggctgggtggcgacgacgcgcgtgtgcgggagctggagctggagctggaccggctgcgcgccgagaacctccagctgctgaccgagaacgaactgcaccggcagcaggagcgagcgccgctttccaagtttggagactagactgaaacttttttgggggagggggcaaaggggactttttacagtgatggaatgtaacattatatacatgtgtatataagacagtggacctttttatgacacataatcagaagagaaatccccctggctttggtttcgtaaatttagctatatgtagcttgcgtgctttctcctgttcttttaattatgtgaaactgaagagttgcttttcttgttttcctttttagaagtttttttccttaatgtgaaagtaatttgaccaagttataatgcatttttgtttttaacaaatcccctccttaaacggagctataaggtggccaaatctgagaacaattaaattcattttagttataataaatttaatatttgtaaatgtaacatagtttcagtgtgatttctagagctaattcaaaatagtattgatatattttatgtgactgcatttttggggaggggtaccgaaatcgttaaatttgtcagtttgcaaaaatatcaatctttaatgggagaattttcaatttgccaattttttccttgaatgggtttaagtatgctacaatatacagttcaggcaaaatttaagatgtaattatcttcaatacttaagtgtgcttgctttctagtgccttggttttctttcttgatgctggaaaaataaacaaaccggtattgagtgtttaggcgagtggaaagtggctacaatccaaaattttaaatttaactctgcctcggccattcaaaagtctaataacaaaaaatgtaaacctaatttggcagtttgttaggttagacaactgacagcctcatttcattcctacaagttggttttcagtaatctcttccttccccccagtaaggctggaagaggctcttggcaaacttcttagtgcaagcaatggttagattaatttgtgaggcagctctttaagacgttcagaggtaagaaatactggatttataaagcaaatggctgtttgggggattccaaggatttacctaattgtccaattctacgtgctctctataccaaaacaaaaaaaaaaagctatccacctttccatgtgggtcaaactaaaattagaaatgtcccctcactgcagatcaaatgtaaagcttccagttaaggagctaaatgaggtcctcagctgaatgaggaaccctgtacatccccttgcacagccctattctaaatcgcttaaactatgctgatagctgcttaggttcttgagtagttctgctcttaaacgtagggaggccctgagaactaaattttgccccaaaataaaaacagaaattatgagattgcctcctgtcattttggttaacccagtccttcacctgccctgtgtcagtgtcttctgagggcaattgcgttgctcaaatcactagcacagaggttccttaatttggggccttagaaaccattgtgggccttggggtccatgaaccccatgaaattatttgtagacttgtatgtacatttttctggggagaaggttcaagagattcataagattgtcaaactccttgaaggttcagaacctctgcagggaagggggaagaaaaccctcccattaggaagcatgcttttgcagttaaatggcgatggtggaggtgatagggacttcaagagtaaaatgcaccttgtattgcataagaagcatacacaaatcaataaatcaagggagattataccagtaggactgaatcagggccttcaaagctggactgagttggtcctgttctggcacatatggtccactggagacaatgtatgattgagtttttctttggtctaaaaattatattaaacatttattttgaaatagttttcttcgtgtttttttcttctgctatgacgtcatgcagcagccccagaaaaacagctgcttggaaaggcagcaacagtgccctctggctttacagtgcagagctgaagcctcattttgactgaactgtaagatgcagcagtgattatctctgatattagaccctttttctttatttttttttttttttgagacggagtttcgctcttgttgcccaggctggagtgcaatggtgcaatcttggctcaccgcaacctctgcctcccaggttcaagcgattctcctgcctcagcctccctagtagctgggattacaggcatgtgccaccacccccagctaattttgtatttttagtagagacgtagtttctccatgttggtcagggtgctctcgaactcacgacctcaggtgatccgcccgcctcggcctcccaaagtgctgggattacaggcatgagccactgcgcccagcccagaccctcttcttaaagagggattcagctatgaaaatcttatttcccctagtattagaaaaatgatatttagaaaatgaatcttggaaagactataaatgcatttatcatcagaaaaagtatgttttagaagacaaattcagcccagtcttcaaatatacagatatctaggctgggcacagtggctcatgcctgtaatcccagcactttgggaggctgaggtgggcagatcacctgaggtcaggagttaagagaccagcctgaccaacatacagaagccccgtctctactaaaaatacaaaaattagccgggtgtggtggcacatgcctgtaatcccagctactcgggaggctgaggcagcagaatcgtttgaacccgggaggtggaggttgcagtgagaggagatcgcgccattgcactccagcctaggcaagaagagcgaaactgtctcaaaaatatatatatacacaaatatctaattacaaataactctcatacatcaatttaccttaagctatgcaagtatgtctgaattttgctttcaaaggcactagcattttacctttttttttgcatttatattctcacaatgatgaggtttattcaaaatttcagttttaacactttctatactttttttttttttttgagacggagtctcactctgtcgccaggctggagtgcagtagcgtgatttcggctcactgcaacctcagcctcctgggttcaaccgattctcctgcctcagcctcccgagtagctgggattacaggtgcacgccactgcaactggctaatttttctatttttagtagagacggggtctcgccatggttgccaggctggtctcgaactcctgacttcaagtgatccgcccgtctcagcctcccaaagtgttggcaatataggcataagccaccgcgcctggcttttttttttttttttttttgagatgggtcttgctctgttgcctaggctggagtgcagtgtcgcgatctggacttacggcaacctccacttcccaggctaaagcgatcctcccactgcagcctcctgagtagctggtacttgccaccacgcctggctatttttttttttttttttttttttttggagagacagggtttcaccctgttgcacaggctggtctcaaactcctgggctcaaactcctgggctcaagcaatgcgccctcctccgcctcccaaaattacagttgtgagccaccaagcccagcctattcctacacttttcttttttttggggggggggtgagggatggagtcttgctctgtcgcccaggctggagtgcagtggcgcgatctcggctcactgcaagttccgcctctcaggttcatgccattctcctgcctcagcctctcaagtagctgggactacaggcacccgccaccacgctcagctaattttttttttgtagttttagtagagacggggtttcaccgtgttagccaggatgatctcgatctcctgacctcgtgatccacctgcctcggcctcccaaagtgctgggatgatgggtgtgagccaccacacccggcctcctatttcttcactttctattgaaacatttaactagcatattgctctcctggcagagaaaacaattagttacctatattttaatttaaaaaaaaaaaggttgggccgggcgtggtggttcatgcctataatctcagcactttgggaggctgaggtgggtggatctcttgagatctggagttaagagaccagcctgaccaatatggagaaacctcatctctactaaaaatacaaaatacaaaattagccgagcatggtggcaggtgcctgtagtcccagctacttgagaggctgaggcaggagaatggcatgaacccgggatgcggagtttgcagtgagccgagatcgccccattgtgctccggcctgggcaacaggagtgaaactcagcctcaaaaaaaaaaaaaaaaaaaggccgggcgcagtggctcacgcctgtaatcccagcactttgggaggccgaggcaggcagatcacctgaggtcaagagttccagaccagcctggccaacatggtgaaaccctgtctctactaaaaatacaaaaattggccaggtgtggtggctcacgcctgtaatcccagcactttgggaggccaaggcgggcggatcacgaggtcaggagatcgagaccatcctggctaacatggtgaaaccccgtctctactaaaaatacaaaaaattagctgggtgtggtggcgggcgcctttagtcccagctactcgggaggctaagacaggagaatggcgtgaacccggaaggcagagcttgcagtgggccgagatcacaccactgcactccagcctgggcaacagagcgagactccgtctcaaaaacaaaaacaacaacaaaaaaacacaaaaattagctgggcatggtggtgggtgcctgtaatcccagctacttgggaggctgaggcaggagaatcacttgaatccgggaggcaaaggttgcagtgagccaacatcacgccacactgcactccagcctaggtggcagaataagactctgtctcaaaaaaaaaaaaaaaaaaagctttttttttttttttaaagaattggggtttcaacaggcccggtgactcacacctgtaaccctagcactttggaaggccaaggtgggcagaatccttgagctcagtagtttgagaccagcctgggtaacatagtgaaaccctgtctcaaaaaaaaaaaaaaagttgaaaaaaaaaaaaaaagatggggtctccctcagttgcccaagctagactgcagtggcgctatcatatctcactgcagcctcaaattcctgggcttgagtgatcctcccacctcaggttcctgagtagctgggactaaaggtggataccaacacaccccgctgatttacctacattgaacagggggctttgatgataaatgaaccccaagcccactctagcctttcacttaagtcctctgtcaagcattttaactgagctgctcaaaagaccaggcttacaaattagcaatttcagtttgttccctttttcctactggggcctaggtattcaatcaggaaaaactgcttctcaaactgacacagctagctggacagcttttcttagagccctcaggagacagggtcctctagacttcagagttttaggagagagagccagggagttccagattggtttagttctgaaaaacagactaagtatctctaaagaggggaagcataataaagattagacaggccaggcgcagtggcttcatgcctgtaatcctaacactttgggaagccaaggcaggagggtcacttgagctcaagcacttgacaccagcctaggcaacacagttaccaacacaggcaacataaccagcctcgtctctattaaaaagtaaatttaggccaggcatggtggctcacgcctgtaatcccagcacgttgggaggccaaggcagatggatcacttgaggtcaaaagttcgaaaccagcctggccaacatggcaaaatctcgtctctattaaaaatacaaaaattagccaggcatcgtggcgggtatctgtaatcccagctactcgggaggctgaggcaggacaattgcttgaacctgggaggcagaggttgtagtgagccgagatcgcgccaccgtactccagcctgggcaacagagcaagactttgcttggagaaatgtaaataaatatactctgccctaatgactgcaaaagttaaagaaaccaaagagggactccacagacttaaacaacaaaacccacaaccaaatactctacctacttaagggctggctatatttagtcaagcattaggtaatgcatcagttcttcccttgatcacttatacccataacagctagcaacaaatattcacaacagtgtggtggaaaagttggttatagttaaaaagtacttgaacgttaagtacttaagtacacttgagtttgtggggtttcgaggtttgtttttttgggggaagtactatttctcacatttgcacaacatcactggaataacaattccactttattattctttctcaagcaaagtgtaaatggttgaggctagaaataaaaagttatttttttaaaaaaagagaatgttgccaggtacggtggctcacgcctgtaatcccagcactttgggaggccgaggcgggcgcatcacaaggtcaagagatcgagaccatcctggccaatatggtaaaactccgtctctactaaaaatacagaaaaaaaattagctaggcatggtggtgcccacccgtagtcccagctacttgggaagctgaggcaggagaattgcttgaacccaggaggcagaggttgcagtgagccgagactgcgccactgcactccagtctggtgacagagtgagactctcaaaaacaaacaaacaaacaaaaaaagctacaaaaattagccgggtgtggtggtgggcgcctgtaatcccagatatttgggaggctgaggcagggagaactgcttgaagccgggaggcagaggttgcggcaagccgagatcgtgccactgcactccagcctgggcaacagagctagactccatctcaaaaagaaaaaaaaaaaagaatgtcaaattcaggccctaaacaccatgggaactgctgaccaaaggataaaagtcatactttgcaactggagcaaaatatatggtccaggaggcaaaatttcaatctttggccaaatttttgccaaaaaagatcaagaacaggatgttggggcctaaacacaggagggtaaaaaactgattaactggccaggcaccgtagctcacgcctgcaatcctagcacactgggaggccgaggtgggcggaccacctgaggtcaggagttggagaccagcctggccaacatggtaaaaccctgtctctactaaaaatacaaatacaggccgggcacagtggctcactgactgtaatcccagcactttgggaggccaaggtgggaggatcacctgaggttgggagttcaagaccagcctgaccaacatggagaaaccccatctctactaaaaatacaaaactagccgtgcatggtggcgcatgcctatagtcccagctccttgggaggctgaggcaggagaatcgcttgaacccaggaggcagaggttgtggtgagccaagatcacaccatcgcgctccagccttggcaaccaggtgaaactccgttccagaaaaaaataaaatgcaaaaattagccaggcatggtggtgagtgcctgtaatcctagctacgcgggaggctgaggcaggagaatcgcttaaacctgggaggtggaggttgcagtgggcgaaatcgcgccactgcactccagcctgggcgacagagcaagattccatctcaaaagaaaaggaaaaaaaattgatttaactgtggaaaccaaacagaagcaagcatcttcatcccgaagagggggaattactgtaaagaatcactccttttctgcaattatacaggcagcaggaaaaaaaaacaaaaaaaaaacctcctacctctgtcaacgaatcctactcacacatagtcactgctccctaggatttggccatcaggcaaaatgagtgtccaggacttcacagccacaaccagtgggcaccctgagagactgatcctcattcagcctacttggatggctcttttgtgatgctatggacaactaaggccacactttggtaaggcaggctttccaactgccccaatgatctttgaagcattccttgtgaagttctcatataacaaagttacaaggagtaagtgtttacatagcgacttaagactagttactcctctaggtatttatgagggagacagtgctgataccattttcaaatgaatatagagtttgtagaatttgtcataaaagcataatgcaactcatctgagaggggagagctgaaaaggaagttgaaagtctggttgaacagtagatgaacaatagactaagcagcaaaatgaccagtttggcctcattatcagtatttggcctctggccaagtcaaccaagttaagggcagcacacacagaaacagagctcggagttcctaattttcagtcctacagtcctgtgttttccttagataaccaggaggccactaataagctggttttattcccattttttctttttttttttttgagacagaatcttgctctgtcacccaggctggagtgcagtggcacgatctcggctcactgcaacctccagccccggggttcaagcaattctcctgcctcagcttcccaagtagctgtgactacaggtgcacaccaccacactcagctaatttttgtatttttagtagagatggggtttcaccatgtctgccaggacggtctcaatctcttgacctcgtgatctgcccgccttggcctcccaaagtgctgggattacaggcgtgagccactgtgcccggcctattcccaatttttcttagcaaagaatggaaaagcttgtgggtcaaccttaaggatagtaagtttcatttacaaatgagtaacaaatttctgctgctggtacagtatttgccactcagtagcatccaaaaatttcactagattacttcataatggaggatgaatcccaagtgtctaggatcctccattaaattcttgacagaagacccacaaagatcgtctttaaaagccttttctgttcctatgactatttaagtcctaccaagttagttagcttttttaaactcacatctcttgatcagtgtagagcgaacatgtcatatgtaggtaaaaaatcaaaccacagtaggcatcaagtgtactgaagcttcagttaggagtaagtggttccagttttggattgaggaccctagtcaatgatgatcctattttgtaatccagttgtaaaacatctggggagcagagggaaaaaagttaatgctatggagttgtcactccaactgaagaaaaattattaataggaggagcagaacttcagttctggaaaacttttttttttttttgagacagagtcttactctgtcacccaggctggagtgcaacggtgagaggctcatggcaaactctgcctcctgggttcaagcgattctcctgcctcagcctcccgagtagctgggattacaggcacgcaactccacacccggctaattttgtatttttagtagagaaggggcttcaccatgttggccaggttggtctcaaactcctgacctcaggtgatccacccgcctccacctcccaaagggctgggattacaggtgtgagccaccgcgccaggccaagttctgttaaacttttagtaaggctgaaggcttaggcatgttttgaccatttgtaactgataataagactcatcacaaggtacccacaaaattcactgccagtcactctgctacgtcaaagcctctcctacttcagcacctacctaggcataattttaactgacattttagcaataaaacttttatttgaagatatccttgagccacaaatctctctggatttagatttcaagcagtaggaagtaagatggtttaacctgcaattcaataaaagaacttcacatcaaacttcaatctttaagaagctgctacagctataatgtaaggttaagagtttattctttcaaagcaggtctcctcatctcttaaacgctatacatatgaagtagataaaaactggtttcttttttggtagcatttaggatctacaaaagtgatccttcaattacttggaatttcaaaaaattgaggttacctagtaacaatgcaccagtagaacacaaaatactctgactttgtttagtctgtgggaaaagaaaaatctttaaactggaaagattttgtagtcttacaaagattacattggaattggaattactgtagttcgtttttccctctaggagggcagccatttctctaaaagttgtgtaaaagttaagactaggatttcaaaatgcaagcagatgttgatgaagcatacgaaatgggcaactccgtttctatttcggagccgcagcgactccgactttgtgccccaaccctgtaaagggcaaaacctcatcccttcggtgtaaactttcaagagaagtggggcagcacactttaggcgtttcaccaagaggctggcgacatgctaggtcaggttgtccggagaatcggggctgaatgggagagatcttgagggcaagagcctcagagaccttcaggcaccgagctcgtgaaggtttccaagtgcccctctctagctgctcccagggggaattagtggttgctacagtagtttaagagggtcgtggtttttcgcaacccgggcggcgagatggcgctttggtgtaagcgaggtaaggtgggtgcactgggatctccgctctcggagcctccagctgactgccacgccgacttgtggccagacctgcgacctccgccctcccccgcggcgccagcctctggaatctggcgtcgcccccacctctccagtcgaagtgggagtccctctgtgcggggcctcgccgccatacccaggccgaatgggggtggggagggaagctggcagagctcggcctcaggatccgcgcccctgtggaaagaccgcagagggaagccgtttcaccagcctctccccttctggggtctcgggaaacacgcggtaattaccgaagaaccccgcactctgtgagaggcgaggctgcggggctgccgggacggtttgaggaccgggctcggccgaggagactccaaccttcaccctccctggcccccggtcccacttcccgccgtctcccggcgccgccacttcaggtagcccactcggcccggcctctccccgcgcccggaccaccccccacggggtgctctcactgcgcagcgagtccctccgctgcctcctcccagcccaaaatggcggcgatggccgccgagcttctcgtcgccttcctcaaaggccaaggatccctccgcgcctgctgccccgcccaccttagccggatctattttctgccccgtaaagattaacgccatcaatgaactctttaattgagttcggagaaggcgggtccagttgtgcctcctcacagctaatcgttgccaaaaaagcgagaatattggcagaaggcttgaccaatcaaagaaggcagtgatgcgcgcgcggtctgcccccgcgcaagggtagatgggttttggagtctcgggtgtggctgttgacgttacaggcccttggatcgcttttcaggccagaagaactacaatccccagcaggcaccgcgcgtccaggctctctcttcccccccatcttagtggcctgagcggcttgaccagagctgctgcaactgcagcaagaggtagggctcaggcgttgggaattgcaccgacaggcagtcgcacagaaaggcacacagatgtagtggtgtgcatagcccttgacagcgaataggtcagttccacctttgcaaaacctctttccatgactgtctcccttcttccaagaaatccatccttatcctagttgggtttccctcccagctgcatgtagtgcaaagacctctttccccttttctcctgtttccctttctgagaggaaggagggaggcaggccaggaccttagaggaaaagtcctcagcactaggctggcccaggtcccagctgtgcttctggcctttggagcccagcttggggagaaggttgggggtgcagggctgcatcaagattggggccactggagacagtggggaaggactcgtgagcttgctccatgttctcccgtggcagcagcagccccgctgcactcccagcctccccaggcagtcctcctttgcccctttggtggttggggaaacaaaacttacacctggcttcctggctgccaacctgggcctcggtgacttccaggaggacagtacaggacatgagtcctggtgagggacccgaggagcaggacagagaagacggcccctgaatcccatttggccccttgctggctggaggtgtgaaaaccagcggtggaggcagccttcggggcctgcatttgagaataagggtatgaagggctggggtacaaaatggctgccactgcctgggcaaacaattctgggcagccagagtattcctgacgttccttcaggatttaggtttctgttgttgttcaaagcaggtgtcactagttccaggcgtctgctgaaagatttggaacagaagatgatggccactccgaaccagaccgcctgtaatgcagagtcaccagtggccctggaggaggccaaggtaagtccctgccctcctgcccacccaagcaccacgagcacgggtcccacagctgagatccaaacttcttgtcccagatgtgttggtagatttggaaaaccagtattttgacgaatcagtactatgcactaggcaataggccggaatcccagtctatgctagctgatgaaatcttagtaactggccgggtgcggtggctcacacctgtaatcccagcactttgggaggcctaggtgggtggatcacctgaggtcaggagttcgagaccagcctgaccaacatggcaaaaccctggctgtactgaaaatgcaaaattagcctggcatagtggtggcgcatgcctgtgatcccagctacttgggaggttgaggcaggagaatcgcttgaacccaggggtcggaggttgcagtgagccaagatctcgcaattgcactccagcctgggcgtcagagcgagactccgtctcaaaaaaaaaaaaaaaaaaaaaaaatcctagtaaccctttcaggtaggaattatttccaattcccagaagctaaggttctgagacctgaaatacctgttccagaatcatgctatctacaagcaacagacccagggtttaaacttagggccttctgacaacagaacattgccttgacctcaagtccaaagagggcatggagggactgggttgaatgtttacattttgtccaggctaagaaccaagtctgaagcaggaagaagagtttttggttcataatttggaatggacccaggcaggcaattcacttgagaccagaagttcaagaccagcctggccaacatggtgaaacctcatctctactaaaaatacaaaaattagctgggcatggtggcacatgcctgtaataccagctactcaggaggctgatgcaccagaatcacttgaacccaggatgcagaggttgcagtgagctgagatcacaccactgcactttagcctgggcgacagagtgacactccatctcaaaaaagaaacaaaaacaaaaacaggccaggcgcagtggctcacgcctgtaatcctagcacttttggaggctgaggtgggtggatcacctgaggtcaagagttcaagaccagcctggccaacatggtgaaactctgtctctactaaaaatacaaaaattagatgggcgtaatgacaggcggctgtaatcccagcgactcaggaggctgaagcaggagaatcacttgaacccatgaggcagaagttgcagtgagctgagattgtgccattgcactccagcttgggcaacaagaacaaaactctctcaaaaaaaaaaaaatgctggaagccgggtgcagtggctcacgcctgtaatcccagcactttgggaggccgaggtgggcggatcacctgaggtcacgagttcgagaccagcctgaccaacatggagaaaccccatctctactaaaaatacaaaattagccaggcgtggtggcacatttctataatcccagctagttgggaggctgaggcaggagaatcgcttgaaactgggaggcggagtttgcagtgaactgagatcacgcccctgcactccagcctgggcaacagagcgagactccgtctcaaaaaaaaaccaaaaaaacaaaaaaacctgaaattagcccggcgtggtggtgcatgcctgtaatcccagctgcttgggaggctgaggcatgataatcacttgaacccaggaggcagaggttgcactgagctgagatcatgccactgcactccagcctgggtgacaaagtcagactttctcaaaaataataataatttgtaatggaggtgggggtaggatataacccacgaaagaggagagagaaagatcatatcaggccctcagaggatggcacttcccaacctggcaacaggaacccatgcttgttcggcccatgttctctcagtacctgcccttacccattcttccttagtccacgactccctatagatgagcagggggcttaggacagaggtcagagagcttctgacccaccctgcctagcccattccgtgttttctggattgactgaattcggaattcatgacatgtcagggctacaatgttcagccaggtcacacagcttatctacagtagtggtcatggtggtagagggccaagtcttcaggagggaggcagcaggtagggctagggggctgggctcgcttgggtgagggtggaggatcaatagggcacttctactgagggctgggagcatgtgactgattgtgcacaccaacaagccaccatgccttggcatcccagtggccttgcctgtcccagctggggcaacagctctgtcttatttggcccaagccactggtggagacaagggctattgcttttatttcgtgatctccctgcaggtgaagtaacacaacaaactccacatacgtacacaccccacacacatacacaccctgacatacctccttttccctgaaattctcttcggggtctgcaaaacacacatgacatatgcctggctcttaagggccgcgcatacaccacattcctcagtacacaccctgtgtgcatggaccacgctcacatgtctctgaactgcgttgcatattattcaacaacataccagtggtagtggttattattagaaattgcccaaaccacaaacttagagcaattcatttcccatctcccacacccagtactcccacccttcccacaacagagataaacagatgccctgaacatacactctcttgacagcctttatacctcttagataagttctggaactctctcactgcagactggaggctgaccctccctctctttggagaggatctctttcctgccattcatattggagagtgataccacctaccaacttctgcctggaataaatatgttccatcattttattttattttattttttaatttaatttaatttaatttaattattttattttattttttgagccagagtcttactctgttgcccaggctggagtgcagtggcgtgatctcgcctcactgcaacctccgcctcccaggttcaagcgattctcctacctcagcctcccaagtagctgggattacaggtgcgtgccaccacacccggccaatttttttgtatttttagtagagacggggtttggccatgttggtcaggctggtctcaaactcctgaactcaggtgatctacctgccttggcctcccaaagtgctgggattacaggcgtgagccaccacgcccggcccgctgcatcttctttatgccagaaggatagagaaggggagtcttttttttgagactccagctctgtcactcaggctggagcgcagtggcgcaatcacagctcactgcagcctcaaccttctggactcaagtgatcctcccacttcagcctcccaagcagctgggattacaggtgctcaccaccatgcctggctaattttttgtaatttttggtagagatggggtttcgccatgttgcccaggctggtcttgaactcctgggcttgagcaatccaccctccttggcctcccaaagtgctaggattaccagcgtgagccactacacccggccgtaagtcttatttcccaatatcttttggatctccctatcctataatctttagtccacttaacagatatttactgagcactgcccttgtgctgtgcataggaatatagtggtgacttggacagacagacgagatgcgttctcacatgaggaagacagatgttaaatggccatatgctaaatgctatgtgctaactgtgtgatgtgatagaatcactagggaggcgagatgggggagtctacattaggtagggtggtcaaggaggggctccctaaggaagtgacattggaactaagctctaaaagatgaaaaaaggtagctggcagtggtggctcacacctgtaatcccagtactttgggaggccgaggcgggtggatcacttgatgtcaggagtttgagaccagcctggccaacatggtgaaaccccatctctactaaaaatacaaaaaattagctgggcatggtagtgggcacctgtgatcccagctactctggaggctgaggcaggataatcgcttgaacctgggaggtggaggttgcagtgagctgaggtcgggccactgcactccagcctgggtgacagagcaagactctgtctcaaaaaaaaaaaaaaaaaaagcccaggtgcagtggctcatgcctataatcccagcactttgggaggccaaggtgggcagattacttgaggtcaggagttccacaccagcctggccaacatggtgaaaccccatctgtactaaaaatactaaaattagcctggcatggtggtacacgcctgtagtcccagctactcaggaggctgaggcaggagaatcgcttgaacctggaaggcggaggttgcagtgagctgagatggcaacactgcactccagcctgggcaacagagcaagactctcacacacacacaaaaaaaaagatgaaaaaaaagccatgcaaatagctggaagcaggatcagctgcataatttgtggggcccagtgcaaaagggcaccttattcaaaaattattaaaaagttaaagacagtggccaggtgtggtggcgcatgcctgtagatccagttacttgagaggctaaggcaagaggattgcttgagtctaggagtttgaggctgcagggagttattattgcacctcactgcattcttgcctgggcaacagagtaagaccctgtctctaaaaataagagtcttttttgtttgtttgtttgtttgtttgtttcgagatggagtctcactctgtcgcccaggctgaagtgcagtggcgcgatctcagctcactgcaagctccgcgtcccgactagctgggactacaggcgcccgccatcacacccagctaattttttttgtatttttagtagagatggggtttcaccacattaactaggatagtctcgatctcctgacctcgtgattcacccatcttggcctcccaaagtgctgggattacaggtgtgagccacctcgcccggcctgtttgtttgtttttgagatggagtctcgctctgtcacccaggctggagtgcagtggtgtaatcttggctcactgcaacttccgccgcccacattctccagcctcagcctcctgcatagctgggatcacaggcacgtgccaccacgcccggcttatttttgtatttttcgtagacatagggtttcaccatgttggccatcctagtctcgaactcctgacctcaggtgatccgcccacctcggcctcccaaagtgctgggattacaggcctgagccaccatgctgagcctaaaaaacttattttaggccttgcgcggtggctcacacctgtaatctcagcactttgggaggccgaggcgggtggatcacctgaggtcaggagtttgagactaggctggccaacatggtgaaaccctgtctctactaaaaatacaaaaaattagccaggcgtggtggcacgtgcctgtgatcccagctacgcgggaggctgaggctggagaattccggaggcagaggttacagtgagccgagattgcaccactgcactccagcctgggtgacagagcgagactccatctcaaaaaatgaaataaaataaggttttttttttttttgaataacatgtttaagagaaggacagcatgaagccaggtgtggggcctctgtgggacttcacaggtcacctgcccatgaagccagtggtgtttgaaagtcaggttttctgggaagagggaagagccggtgccatttgggcttctgatcaagcaaatgcatcaagatccaccttctatcccagttttcttcttctcctactttactcatttggacagtatttatggaactcctactcagtgccaggtattattctaggcattgaaattacagagtgaaacacacaggcaaaattcctgctctcaccatgagtttacttggggaaggttgggggacagacagtagacaggtctctttgtaaacaaatggttccaaaaggttgaggggctaagagtgaccaagttagctgagtgtaggaaggtaggcttcaggctaggtagagagggaaaggttccacctccaaggacaggctgtctgatccatccttcttcctcctccctctctttagacctctggtgccccggggagcccccaaacaccccctgagcgtcatgactctggtggttccctgcccctgacaccgcggatggagagccactcagaggatgaagatcttgctggggctgtcggtggcctgggctggaacagtaggagtccccggacccagagcccagggggctgctcagcggaggctgtgctggcccggaagaaacaccgtcggcggccatcgaagcgcaaaaggcactggcgaccctacctggagctgagctgggctgagaaacaacagcgggatgagaggcagagccagagggcctcccgggtccgcgaagagatgttcgccaaaggccagcccgtggccccctacaacaccacccagttcctgatgaatgacagggacccggaggagcccaacttggatgtgccccatgggatctcccacccaggttccagtggggagagtgaggccggggacagtgatgggcggggccgagcgcacggtgagttccagcggaaggacttctctgagacttacgaacgcttccacaccgagagcctgcagggccgcagcaagcaggagctggtgcgagactacctggagctggagaagcggctgtcgcaggcggaggaggagactaggaggctgcagcagctgcaggcgtgcaccggccagcagtcctgccgccaggtggaggagctggctgccgaggtccagaggctccggaccgaaaaccagcggcttcgtcaggagaaccagatgtggaaccgagagggctgccgctgtgatgaggagccgggtacctaggggtgcctcccagcctggtggacccaaggagaaggtcccatttcgtgcacactcaggccagctgggtctcaaggaggcaggtggcagatgaaaaccaccgtcaacaccctgtgcgccctgagaacagctaaatcggttcagactcccacctcaccgtttccatagttggctcttttgtgtcatcttaccctttacagagaaattaaatggccttggtgggaccaaatgggagtatctaggattgatttcactagggctgttgtgagaaccaaaacatttgccccagagaggtctgagtggggtcccagtccctgctgccccaagcctggcaggacagcagacctctggatggggacctcccaaggtctccgggatacctgaatcctgctctgtgggtgttggagcaatcagactgcacagaaggttttctaggtgggagggagttcagtcaggagcccccagtttcggccagaaactgacgctcaagataccagatcgctgtgaggagttgtgagctttccctggaggagagaacgggggttttcggagaagacccaggcccaggggttccttcagagtttgctcctgagctccctgtattctccccacagtttaaaggctggactagacgggttctgggtgccttgtgcctccttgttcttgacagcccccaaccctgacccctctctgcagggggttgggcctgaggttagtcatcatgtgtttgtgtttgtcccttacctcccaagggtaataagggaggcgctctcctgatggaaaataaagtcaagagacagagggggacagcacatggatcgccagcagagcagagcagcctggctctcctggtgcctgccatgtgtctgtgcgtcctgctcctctcagcctcatcatgtgggtgtgaattctctgaagtgtgtgaggccctcgcctgtctgcatcagagagagctgggtcagcctgggtaacgcagataccaccagccagcgtcaggctctgagacaagctcacccaccccctcgcactcagacccacccttccccagacaccctgtctcttccatcccctcctggtgcccttgcagactggtgttgggtgtcaggcagcaatgaacatggacaactaatggtggcggaggaaattagtcaactcaccagtgagccagtgctggctgtgccaccaggcaaggggaggggcagaggcctggctgcccagtctggcttctcttccaggccgtcatcttgacaggccacactgggcaagatgaggcttggcccaggagctgctggggatggaaatgttgatgaaatcttgtgtgttgccaggacaactttcatttctatcctgccacacccaggcctggccagagcctcctacaatgaaacacagaacagattctaggaacgcatgggtttcaagagaaagcaaaatctcatcctgggagacctgcccctggaaccctgggtcctcagacagctcagtcaggaagggcagcaggaatgatcatcgccactttgcagacgggaaaccggaggcttagcgaggaagtggctttttggattccaggagagcctctggaggcctgcctgcccctgtggggtgctgtggggtgctagcctgggacccagaggccccttggcatttgctggcagcctcccagctgcattcctcagcatggagcccgagggagagaggaggcctgggacaaaggtggacaaaggttgtttacccggaggtgcctctgtgtgtgtgtgtctaggaggtgagagaagattccagagggctgctggagtgtcgggggaggggtgtgggtgagggtgctgggtgctcattgtgggctggttatgccagggaggggcaggtgaagagtttggcctttcttggcccagaagctgaggagcctggaggcagggaagctgccagctgctcctccaacatcccccttacacgtaaaaggctgaagggcgcaaatagggcagcacctcggtgggttaattcccgcacccccacctcaccccgctggagggcgggtggggcaagaagagaacaaaggagaggatgctagccgggagtgtgggagggcctgaacccaaatgggaggggtccgtgaaaagggtccctgtctgcccctccccctgtctggctccctgattcctgggtaaggggtgtgcagggaggagatcgtcctggggccagagctggggcttagcactggagagaaccggctcagctgtgggtgggagccaggcctgggtccctcggtgccccgcccccttcgctgcttccagttgttcccacacctgctgcttggtcttgaagcctgggcctccactccgcctactgcaatggtggaagctccagtttacaagacacccccacccccacatcacacgccctagctggggaagttgggcttggacacagcctccctgggcctttccacagctgccctcacgccctgtgctttctgggaccctcttggtcaactgggccggggaagggaagcgcagagaacatatgtttcatgggagtgactgttgaagcctcccaccacccctgcccagcctgtcttaggatccctctttcttccccggcaggaactgcccgaccccaggtggaaactcctgtgcccagtggacagaccctgcctgcaatagggtcagagtatgagggagaggggtaggcagagattggtgggctggggcaggaagaagctgccagggagtggggggagggggtccaaagggaagtaacggtattggggggaaaggtggccaggtcccattgcccttgttgggaacaggcaagtgtggcactggccctttaagtgggggtgccagtcagtgccctcccccaaccaacccaattcatgggcacactgagcatgtgcaggggctgtgcatgtggggaggggaggagaggggaggggagaggggggcatacattccggagggagcttctcatccccctacttccggtagctgcccccactctccttcctgggtctgacaaaggagcccatggtgctcacccaatcccttcccccaccccaggccccagggggtgctgccctctgcaagtgctgaagctgccatgggtgctgggcaggccctctctgccctggggagtctcctggccgcctggaggtggcacacatgcagcccagtgccggcctcacttccctggtgtgggcggcggcgaatcttcctgctgcctacgtgttccatttcattccattggtgccagggtttttaaaagaaccatccacctgtgatgccactttgaaagtgaaacagctcaaaggatgcaggccctaccccctaaccaggaccttccagtcagagaggaagcaaacagcccagaggctgcaagggccttccttgaatcccgctccttctgcttctcccctgctggccaagggatcaaagtcagcttcctccagactaccttcacctgcagcctgggaccttccctcaaacctttccaccacctaaaccttacctgtttctgccaagtcttcccctctcccagccctcagcccctcctgttaccacccctacctctttagcacttgtccactcttagctactggtaccattctttttattttttatttatttatttttttttgagacagagtctcactgttgctcaggctggagtgcagtggtgcgatctcagctcactgcaacctctgcccccccaggttcaagcaattctcctgcctcagcctcccgagtagctgggattacgggcacctgccacgacgcccagcttatttttgtatttttagtagagacgggtttacatcctgttggccaggctggtctcaaaaactcctgacctcaggtgatctgcccatctcagcctcccaaagtgctgggattataggcatgagccaccatgcccagcttatttttcattctttttttgtttgttgttttggtttttgagacgcagtttcactcttgttgcccaggctggagtgcaatggcgcagtctcagctcactgcaacctccgcctcccaggttcaagcaattctcctgcctcagcctccgatgtagctgggattacaggtgcccgccaccatgcccagctagtttttgtatttttagtagagacagagtttcagcctgttggccaggctggtctcaaaaactcctggccaggcgcagtggctcacgcctgtaatcccagcactttgggaggctgaggtgggcggatcacgaggtcaggagatcgagaccatcctggctaacactgtgaaacactgtctctactgaaaatacaaaaaaataaccgggtgtgctggcgggcgcctgtagtcccagctaccgggaggctgaggcaggagaatggcatgaacctgggaggcggagcttgcagtgagccgagatcgcgccactgcactccagcctgggcgacagagccagactccgtctcaaaaaaaaaaaaaacaaaaaactcctgacctcaggtgatccgtccaccttggcctcccaaagtgccaggattaaaggcgtgagccaccgcacccagcctatttttcattcttgaagtgaaatttacatgccacaaaatcacccctttaaaagtgaacaaagggcgggtgtgggtggctcatgcctgtaatcccagcactttgggaggctgaggtgggcggattacctgaggtcaggagttcgagaccagcctggccaacagggtgaaaccccatctctactaaaaaatataaaaattaagtcaggcacgctggctcacacctgtaatcccagcactttgggaggccaaagcaagtggatcatgaggtcagtagtttgagaccagcatgaccaacatggtgaaaccccgtctctactaaaaatacaaaaattagccgggtgtggtggcgtgcacctgtaatcccagctactcaggaggctgaggcaggagaatcacttgaacccgggaggtggaggttgcagtgagctgagatcgcaccactgcactccagcctgggcagcagagtgagactccgtctcaaaaaaacaaaaaaaaaaaaaaagaaaaaagaaaaaaaattagttgagcgtggcggcatgtgcctataatcccagcttcttgggaggctgaggcaggacaatctcttgaacccaggaggcggaggttgcagtgagccgagatcgcaccactgtactccagcctgggcgacagagcgagactccttttaaaaaaaaaaaaaaagaaaagaaaaaaagtgaataaggccagggcatggtggctcacatgtgtaatcccagcactttgagaggcccaggtgggaagattgcttgagcccgagttcgagaccaacctgtgcaacatgatgagaccctgtctctaccaaaaaaaaaaaaaaacaaccaaacaaaacattcaggtgtgttggtgcacatctgtagtcccagctactcaggaagctgaggtggaaggattgcttaaacccagaaggtcaaggatgcagtgagctgtgattgcgtcactgcactccatcctgggtgacagtgagaccttgcctcaaaaaaaaaaaaaaaaaaaaaaaaggctgggctcagtggctcatgtctgtaatcccagcactttgggaggccgaggcgggtggatcgtgaggtcaggggatggagatcatcctgtccaatgtggtgaaaccctgtctccactaaaaatacaaaaaattagctgggtgtgggtggcgcgcgcctgtagtcccagctactcaggaggctgaggcaggagaatcgcttgaacccaggcggtggaggttgcagtgagccaagatcgcgccactgccctccagcctggcgacagagcaagactccgtctcaaaaaaaaacaaaaacaaaaacgtgaacaacccagtggcatttagtacatattcatgatgtgtgcaactgccacttctagtttcaaacattatcactccaaaaggaaaccctgtacccattaagcatttactccccattccgtccttccctagtctggcagccaccaatctgctttttgtttctatgggtttactcattctggatattctggtggtagagccacgaggggaaaactctctggtctcttggtgtctgtacctgaaacacacagactccccgagggtgctgctgtagagggagcactggaccaggagtcctgagccctgtgatccatcccagttcttcttctcactcaggggctctttttcttcatttgttcaaagggttgggaggtggcctcaggccagtttaggatcctgcatcctccaggacccatccctggccagggggcttctacctggaacaatgctgcctggccaaccaccccgttgatctcctgcctcctccctgtgagtccaggcagtgaaggtggagccaggggacagtgtgattaatactgtggggtttagggtaagacacaggagatgaagaaacttgagctcagagaggttgagaaacttgcccaaggccacacaattcctgccatactggagccttagccggttctctgattgtagtttgagcccttgaccaccttagtctcctatcttcaaagagataaagtaaattaaaggcttagccaagtgccagctgtgtgggaggtgtgctcagatggaagcagccatacattttacgacttccaggacattgtgtaatcatgagtagctctattacaaggtggttcttgggagttctcactgtctccctcccttaacttttttcttttttcttttttttttttttcttgagacagagtctcgctctgttgccaggctggagtgcagtggcgcgatcttggctcactgcaacctcctactccctgctactccctggttcaagcaattctcctgccttggcctcccgagtagctgagattacaggcacaggccaccacgcccagctaatttttgtatttttagtagagatggggtttcaccgtgttggccaggatgatctcgatcatgagccaccgctcccggccctccctcccttaactttgggagcaggtttcctctctgccctctctaccagcctctctaggaagacagctttttctttctttctttctttctttctttctttctttctttctttctttctttctttctttctttctttctttctttctttcttttctttctttctttctttttttttttttttgagatggagtctcgctgtgtcacccaggctggagtgcagtggtgcaatctcggctcaccgcaacctctgcctcccaggttcactccattctcctgccttggcctcccaagtagctggaaccacaggcacccgccaccaggcctggctaattttttgtatttttaatagagatggggtttcaccatgttagccaggatgatctcgatctcctgacctcgtgatccacctgcctcagcctcccaaagtgctgggattacaggcatgagccaccacgcctggcctttttttttttttttaattgagacagagtctcgctctgttgcccacgctggagtgcagtggcatgatctcgactcactgcaatttctgcctcctgggttcaagcaattctcctgtctcagtctcctgagtagctgggactacaggcgcccgccaccacgcctggctaatttttgtatttttagtagaaacgggtttttaccttgttggtcaggctggtcttgaactcctgacctcaggtgatccaccggcctcggcctcccaaagtgctgggattacaggcgtgagccactgcgccaggctgaggacagccttcgtgggggctgggagggggccctggaccccgagcccttcaggcaagtggatgtgtgggaagcattgtttttcttccccctcaaataaggagattttattgttcctccccgcatcccttcaaactgtatttatccatattttcatggctgaacctccacccttgcccctcaaagaggaagtcttttgtggagccagagaaaggaggggactgctcaggcctggcctgtcagggggacaggctgcacagctgacacccagttggccactgtgtcccggcggcttgtgagcatggacattccagagaccacctgccccagaagccccctctagaccccgtttaagatggaaaaccccagacgagccctcaaggcacctgctgtgtcctgcctcagggcatccatgacaggtccctctccttacctgatgcctcaggaggatgtgctcaaggagactaagtcatgagatggacattgtgacccacgtgagcctcagtcagccatgtggtgactgctttgccacagtttgaggacctggacaggctccctcgtggcccgtaccttgagccgagccctgtggctgccgggctggcaagttcccagcctgaggaccacgaagtccccaggccccacatccttaagggcttgacctccatgcctttgcttctcagcaccagccagctgtttccctcttgagcctctgagaaagaggatcttttttctctgggcccctggtcccactgtcctcacttgtaattcacattagttgtgtttgttgccacaggtctatacccttcctcccaggctctctcctgaacaaccctggcttccctggcctccccaggcagcaatcccctgctccctctcctcccctctttccctgagctccagattctagcagattttaaaaattattgttgtaggccgggcgcggtggctcacgcctgtaatcccagcactttgggaggctgaggcaggcagatcacgatgtcaggagatcgagaccatcctggctaacatggtgaaacccgtctccactaaaaatacaaaaaaaaaaaaaattagccgggtgtggtggcgggcgcctgtagtcccagctactcaggaggctgaggcaggagagtggtgtgaacccaggaggcggaggttgcagtgagccgagattgcaccactgcacttcagcctgggcaacagagtgagactccatctcaaaaaaaaaaaaaaaaattgttgtaggctgggcatggtggctcatgcctgtaatcccagcactttgggaggctgaggcaggtggatcacgaggtcaggagtttgagaccagcctggccaagatggtgaaaccccgtctctactaaaaatacaagaattagctgggcgtggtgtcaggcgcctgtaatcccagctacgcaggaggctgaggcaggaggcttgaacccaggagttggaggttgcagtgagttgagatggcaccactgcactccagactgggcaacagagctagactctctctctctctgtctctctctctctcacacacacacacacacacacacacaaaattattgttgtagtcttaatttttccaaatggctatacaggccgggcatggtggctcacacctgtaattccagcactttgagaggccgaggcagagggatcgcttgaggtcaggagttctagactagcttgggcaacacaaggagatcccatctctactaaaagtaaaaaacaaacaaaaacaaatggactgggcacagtggctcacacctataagcccagcactttgggaggacgaggcaggtggatcacttgaggttaggagtttgagcccagcctggccaacatggtgaaagcccatctctactaaaaatacaaaaattatccgggtgtggtggtgcacacctggaggctgaggtgggaggatcacttgaacccaggaggttgaggctgcagtgagctgtgatcgcggcactgcactctagcctgggtgacagagtgagaccctgtctcaaaaaaaaaaaaaagattagatgggtggacagatagatgtgcagatatagacacagatatagatgtgttggaaagagacatgcgagatactcatagacgttagctaattcaacatcctagctttaggctggattaaatatctgcctaaatctatgactctctcttttatttttcttttattgttagaaatatacattatatatacattacataaaatttgccattttaaccattttattaatatatattttttgagacagtcttgctctatcgcccaggctagagtgcaatggcacgattttggctcactgcaacctccacctccccggttcaagcaattctctcacctccgactcccaaataggtgggactacaggcatgcaccaccatgcccggctaatgtttcaccgtgttggccaggctggtctcaaactcctgacctcaagtgatctgcccaccttggccttccaaactgttaggattgcaggcgtgagccaccgctctcagcccattttaatcgtttttgtttgtttgttttttgacacagagtctcactctgtcgcccaggctggagtgcagtggcgtgatctcggctcactgcaaacttcaccccccgggttcaagccattctcctgtctcagcctcccgagtagctgggactacaggcgcccgccaccacgcccagctaattttttgtgtttttagtagagacggggtttcaccgtgttagccaggatggtctcgatctcctgacctcgtgatccgcccgccttggcctcccaaagtgctgggattacaggcgtgagccaccgcgcccagccagtcattttcaagtgtacaattcaccccgggcatggtggctcacgcctgtaaatcccagcactttgggaggccaaggtgggtggatcacgaggtcaggagatcgagaccatcctggctaacacggtgaaaccccgtctcaaaaaaaaattaaaaaatgaagtgtacaattcagtggcattaaatacattcaaattgttctgtaacctcgccatcatccatctctcttcatcttctcaactaagactctatacacattaaacaataactcatcatttcccacgttcttctagcccctgaataccaccattctacttttccatttttaaaaattatttattattattattattatttgagatggagtctcgctcggtcacccaggctggagtgcagtggcacgatctcagctcactgcaacctctgcctcccgggttcaagcaatttgtctgcttctcagcctcctgagtagctggggctagatgctcgtgccactacgcctggctaatttttgtatttttagtaaagacgggctttcaccatgctgaccaggctggtcttgaactcttgacctcaggtgatctacccgcctcagcttcccacagtgttgggattacaggcgtgagtacaattcaccccgggcatggtggctcacgcctgtaaatcccagcactttgggaggccaaggtgggtggatcacgaggtcaggagatcgagaccatcctggctaacacggtgaaaccccgtctctactaaaaatacaaaaaattagctgggcgtggtggcgggcgcctgtagtcccagctactcgggaggctgaggcaggagaatggcctgaacccgggaggcggagcttgcagtgagcagagatcgcgccactgtactccaacctgggtgacagagcgagactccgtctcaaaaaaaaattaaaaaatgaagtgtacaattcagtggcattaaatacattcaaattgttctgtaacctcgccatcatccatctctcttcatcttctcaactaagactctatacacattaaacaataactcatcatttcccacgttcttctagcccctgaataccaccattctacttttccatttttaaaaattatttattattattattattatttgagatggagtctcgctcggtcacccaggctggagtgcagtggcacgatctcagctcactgcaacctctgcctcccgggttcaagcaatttgtctgcttctcagcctcctgagtagctggggctagatgctcgtgccactacgcctggctaatttttgtatttttagtaaagacgggctttcaccatgctgaccaggctggtcttgaactcttgacctcaggtgatctacccgcctcagcttcccacagtgttgggattacaggcgtgagccactgcatccagcctatttaattttttaaactcctatctgtaccagaccttctacttttttggaagcctttccctatgactgccttcctgctgctttccatcttgccagagtccagcttccctccctttgcagaactcctatgttcaagaaatcattgcttctcaatgttacttcccactggaattacctgagaaagttttcacagttccagtgcctgggttccatgcccagaatttctttttttttctttttctttctttctttctttttttttttttttgagatggagtctcgctctgtctcccaggctggagtgcagtggcgtgatcttggctcactgcaagctccacctcccgggttcatgccattctcctgcctcagcctcctgagtagctgggactacaggcgcccgccaccacgcctgggtaattttttatatttttagtagagacggggtttcaccatgttggccaggctggtttccaactcctgacctcaagtgatctgcccacctcggcctcccaaagtcttgggattacaggcatgagccaccgcacccggcccagaatttctgatttaattgttctgggatttttgaggctccctgggggatgctcaggtacacccagggctgagaaccagagttcagagagctgcagaggttttctctgcccggcttgccctgaccaggagtcccaagtgtggagtgccttgcacctgcccacatccctaggaggattccaagatggcacgacctccagggtttagataccaggcaggggagctttagagggccgaccaggaaatgggcagagctcaagttaaagggaaggaggaatttccaccactcagctaggggtcaggctgtccccagagactcctggctcccatcagtggatgtgccagggtgcctgtgaaagggcaggaggtcagaccagaaaacatgccaagtgctcctccagcaatcagattctgaaattctgcctagcaaggaactgttgcttttttgccacaacagcacaacgccctgcaccggggtgtgtgtgcatgtgtgtgtgtgtgtgtgtgtgtgtgtgtgtgtgtgtgtgtgtgcacgcgcgtgatgacttctgtcctatccaggcgagggggcctccgcactggggtttactccaggcctcctgctggtggcacacatgggggcaagtgctgtgtatgagctccccggaagtttcagaatcaaatgctatccttgcttcctccttagtatcttcttgattatcccagccccatttcttctgcttcactcagagcagaggtggggaagaaggaggccacttggaggccaggacagggagggttctctagagccagctgagttactctgaggtcttggcaagtgcagagattgagagcacagactggtgttggacagcccaggttcaaatcctgactttggccaggtgcagtggctcatgcctgtaattccagcactctgggaggctgaggcaggtggatcacttgagatcaggagtttgagatcagcctggccaatatggtgaaacctcatctctactaaaaatacaaaaattggccaggcatggtggtgcacgcctgtaatctcagctacttgagagactgaggcaggagaatcacttgaacctgggaggtggaggttgcagtgagctgagatcatgccattgcactccagcctggacagcaaagcgagactccatctcaaaaaaaaaagtcctggccgggcacggtggctcatgcctgtaatcccagcactttgggaggccgaggcgggcatatcacaaggtcaggagatcgagaccatcctcgctaacacggtaaaaccccatctctactaaaaatacaaaaaaattagccgggcatggtggtgggtgcctgtagtcccagctactcaggaggctgaggaaggagaatcacttgaactggggaggcagaggctgcagtgagctgagattgcaccactgcactccagcctgggccacagagcgagactccatctcaaaaaaaaaaaaaaaaaaaaagaaggtcctgccttacctggctcactgccactctgtaccctctgcagagcaggccaggcacctttccattgtcctgcctggacacacacatccctctctcctggtgaaaagatgccatgactcatcaggaacacaagcagcaccatttgttcattcaacagatattgactgggtgtatttgtttcctaagttgctataataaagtacccccgagtggtttagaacaatggaagtgtattgtttcagttttggaggacagaagtcttaaggtgttggtagggccacactttctttaaaaccagtgggagaaagatccttccttgcctctttatttacttttatgtatagagacaggatattgctataatgcccaggctggtctcaaactcctggcccccagtaatcctcccaccttggcttgtcaaagagctgggattacaggcatgagccaccgcacctggccttccttgcctatttttagcttctagtggtttgctggcaatctttggcattccttgacttgtaaatgcatggcttcaattccttgttttcacatgtccatcttccctctatgcatgtgtgtctctgtgtccaaattttccctttttttttgagatggagtttcactcttgtcgctcaggatggagtgcaatggcacaatctcagctcatcgcaacctctgactcccgggttcaagcgattctcctacctcagcctcctgagtagctggaattacaggcatgcgccaccatgcccggctaattttttgtatttttagtagagacagggtttctccatgttggtcaggctggtcttgaactcccaacctcaggtgattagcccacctcggcctcccaaactgctgggattacaggcgtaagccaccgcgcccggactaaatttctcctttttatagagacaccagtcattagggcccaccctaataacctcattttaacttgattacctctgtaaagactgtttccacataaggttgcattcaaagatactaggagttgggactttaacatatcttttttgtctggggtgtgtaattcaattcatagcactgggtatccacgctgtgcatgctggggatatcccagtgagctcgatggacacagtcactacccttatggagcttacactctcttctgatcttttcatatgaagttttcttttttgagacagggtctcactctgtcacctaggctggagtgcagtggtgtgatcagctcactgcagcctcgattttctgggctccagcaatcctcccatctcagcctcctgagtagctgggaccacaagcatgcgccatgacacctggctcatttttgtatttttggtagaggcagggtttcaccatgttgcccaggctggaagttttatttatttattttatttgttttattttaattaattaatttatttattattattatttttttttttgagacagcgtttcactcttgtctcccaggctggagtgcaatggcatgatctcagctcactacaacctccacctcctgggttcaagtgattctcctgcctcagcctccccagtaggtaggattacaggcacacaccatcacacccagctaatttttgtatttttagtagagacagggtttcaccatgttgaccaggctggtctcaaactcctgacctcaggtgatcctaccgccttggcctcccaaagtgctttacagatgtgagccaccatgcctggccagtagttttatttttaaacaataactctcatttacgaagcactttgtaatattcaaagtgctttcattaatatgagtttattttttattttttattattattttttgagacggagtctcattctgtctcccaggtgagtgcagtggcgccatctcggctcactgcaaccttcacctcccgggttcaagcgattctcctgcctcagcctcctgagtagctgggaatacaggtgcgtgccacaacgcccagctaattttttgtatttttagtagagacggggtttcaccgtgttagccaggttggtcttgatctcctgacctcctgatccgcccaccttggcctcccaaagtgctgggattacaggcatcagccaccacgcccggccatatgagtttatttgggtgatatggtgagatccatttcccgagtgggaagactgtcttttggagatctgaaattacttgtttagggtcatgtgacttataagtaataatacaagtgataacaatatccagcacttgctcaatgccaaccattgtgatatggcttgaatgtcccctccaaaactagtgttaggatttaattaccattgcgacaatttttttttttttagatagagttttgctcttgtcacccaggctggagtgcaatgccacaatctcagctcatggcaacctccgcctcccgggttcaagcaattctcctgtctcagccttccaagtagctgaaattacaggcatataccaacacgcacagctaatttttgtatttttagtggagatggggtttcaccacgttggtcaggctggtctggaactcctgacctcaggtgatctgcccgccttggcctcccaaagtgctgggattacaggcgtgagccaccatgcctggcccattgtgacaacattaagaagtgagacatttggccaggcgtggtggctcatgcctgtaatcccagcattttggaaggccgaggcgggcggatcatgaggtctggagttggagaccatcctggccaacatggtgaaaccccttctctactaaaaatacaaaaaatgagcctggcgtggtggcacgtgcctgtagtcccacctactcaggaggctgaggcaggagaattgcttgaacccaggaggcagagattgcagtgagcgcagattgcactgctgcactccagcctggcgccagagagactctgtctccagaaaaaaaaaagaagtgagacgtttaagaggggattaggtcatgagggctctgccctcgtgaatggatcaatgccgttatcgaggaagtgtgttagttgtgggattgggtcctgataaaaggataagtttggcagatttcctttctctgtcttgcatacttccaccatgtcatgccttctgtcatgtcatgatgcagcaaggaggccctcaccagacaggaccccttgatcttggacttcttgccctccagaaccataagccaaataaatctcttttttttttaaataaattacccagtcagtagttcatcttatatgatccccataaacattttgcaggataaagaaattgaagtaaggtgtccaaagtcacatcgttaataagaggtcacatccgggctgggtgtggcggctcatacttgtaatcttagcactttgggaggctgaggtgggagaatcacttgagttctggagttggagactagcctgagcaacatagtgagacctcgtctctaaaaaaaaaaaaaaaaaaaaaaagtcacaccaggagttgagcccaggcagcccagctgcagcatccagctcagccaccccacgttgctcattacatcaagacacagcctcggctgggcgcggtggctcacgcctgtaatcccagcactgtgggaggccgaggcaggtggatcacaaggtcaggagtttgagactagcctggccaatatggtgaaaccccgtttctactaaaaatacaaaaattagccaggcgtggtggtgggaacctgtagtcccagctacttgggaggctgaggcaggagaattgctggaactggggaggtggaggttgcagtgagccgagattgcaccgctgcactccagcctgggcgacagagcgagactacgtctcaaaaaaaaaaaaaaaaaaaaaagacacagactcatgtctctgttgctgccctctgctctacaccagcacgtcaaaacttagtgttccctccatgcctagcagagagccacctctttgctcttccttatcaactgcattaactgctaccttccatcttccttttttcttctatcttccctttattttttcgtagagatgtggtcttcctatgttgcccaggctgatctcaaacttctggcctcaatcgattctcctgccttggcttcccaaggtgctgagattacaggtgtgagctgctgtgcccaaccccttctccctttctcccttccttcttccctcctcctcccgtctttttctttctttttttttttttaaatggagttttgctctgtcacccaggctggagttcagtggcactatcttggctcactgcaacctccgcctcccaggttcaagcaattttcctgcctcagcctctcaagtagctcggattacaggcctgcactacaacacctggctaatttttgtatttgtatttgtattttttaattttttgagatggagtccagctttgtcgcccaggctggagtgcagtggtgcaatcttgcaacctctgtctcctggattcaagcgattctcctgcctcagcctccccagtatctgggactacaggcacacgccaccacatccagctaattttttatatttttgctagagacagggtttcaccatgttggccaggctggtcttgaactcctgacctcaagtgatctacctgccttggcctcccaaagtgctgagattacaggcgtgaaccacccctctcggcccagagttacttttcaaatgtttaatttattatatggtattttagccataaaatattatacaatattttaagctgggtgcggtggctcaagcctgtaatccccacgctttgggaggccgaggtgggtggatcacctgaggtcgggagttcgagaccagcctgaccaaaatggtgaaaccctgtctctaccaaaaatacaaaattagctgggtgtagtggcgcatgcctgtaatcccagctactagggaggatgaggcaggagaatcacttgaacctgggaaatggaggttgcagtgagccgagatggcggcattacactccagcctgggcaacaagagcgaaactacgtctcaaaaaaaaaaaaaaaatacacacacacacacacacacacacacacacatggccgtaaaatattatacaatattttatataatattttatatttatggctaaaatattgatggggttttgccatgttgcccagcgaaatcctgtctctactaaaatacctatgtacccatcacccggtttaagaactatcaactcttaatgctgtgtgtgggaagcatttaatgctgtgtgtaggaagaaaaaaagttgcaacattgtggtgattgttgaagccccagcattattctgctctctaattgcactctccctcctagaggtaattgggatcctagcttggtgacaatcatttccatgcatctttagaaacatgaagttgcttttgactgacagggaatttcgagcttgattcttgacaaggaaacatagcagaaggtaggtctaaagatggaagtgtagcttgaatggaatctcttttggaaatatataatgatgaaatatttcagacacagaaaggcacatatagaataatagaatgaacctcttgcttaggaaataaaacattaaaaatactaccccgccctcctcaaaacagtccccagggttttccttcctgattgcatccttcttcttttttttttctttatttttttgagacagagttttgctctttttgcccaggctggagtgcaatggcacaaatctcggctcactgcaacctccgcctcccaggttcaagtgattcctctgcttcagcctcccgagtagctgggattacaggcatgcaccaccatgcctggctaattttgtatttttgtgtttttagtagagacggggtttctccatgttggtcaggctggtctcgaactcccgacctcaggtgatcctcctgcctcagccttccaaagtgctgggattacaggcatgaaccaccatgtccaggattttttttttttttttttttgcgatggagtctcactctgttgcctaggctggagtgcagttgtgccatctcagctcactgcaacctctgcctcccgggttcaaacaattctccttcctcagcctcccgagtagctgggactactggtgtgtaccaccacaccctgctaacttttatatttttagtagagacagggtttcgccaggctggtctcaaactcttgacctcaggtgatccacgtgcctcagcctcccaaagtgctgggattacaggcgtgagccaccccgtccagccatatatatatatttttactagacatcatgttggccaggctggtcttgaactcctgacttcaggtgatccaccagcctcagactcccaaagtgctgagaggacaggagtgagccaccatgcccagcctgatttcatccttttagatgaactgcccttctgaatttggggcctatcattttgacctgaatcctgggggaggagcagcagtttggagacaggtaggcgtaggaaggggtgtcaccaacagaaaggcagggtaaagacccaggggagtgagtttgggaggcaggtgttggcatggctggtaagctgggtacctgtcggggaggggctgggacaggtaagtagctggccccactctcctctgggccctgccttccgtatttccctctatcattgtcctaatcacacagaatcctaatgatctgttagcttgactccaagatcctgagggtagggaacctcttggtcattgtcaccccagtggctaacacagtggctggcacaaatggctttttgttaaatattaaattgatacatgagcgaatgagtaactgactgatttcagcctgcctggtgagggagttgctggtagcaagacagtctgagtgcaaagtgtgaacgagagcatttttgaagagaattgtcattttattaccattcagtacagtaacacctctgccttcatcagtgtggcctagtagagaacttgcttgaatgcatatcagtcagggtgagaaatctgctgtgcaggcaggtgtgcgatgatgcggtaaccagatgggcttcttgcagcttcaaccaccgccagcgtcattcactacccttcaaactatcagctctgattggagttaaaggaataatcagtctcccacagaagtaggacctatttctcttccttcaaaacaatcctcaaagcctgtgaatcccctccagtgtgcttattatgcagttagctctgctcgtggctgcagagacagctcgttttgcattcctagaagcccctctcagggctgggcatgcttcggtgggttttgagtggtgagaagtgcttttctcagaggctgcattccacatgaggcctaataaacagataaaacgtgtctgcaattagtggcatctctgcacgcagacttaatgtgctgaaggctgtttgttgatttttttgcactgttcaaagcaatgccacaagctgtttgggccagacgttggcttagagagccccgtcttcccatgaaaaggacaatgcagtgatacaaaagagcccaatgggttgagctacatctatcacataggcaaatctgaacaggtttccaaaaaagatcaaattattaaaagatttggctgggcgtggttgttcacacctgtaatcccagcactttgggaggccgaggtgggtggatcatgacgtcaggagatcgagaccatcctggccaacatggagaaactccatctctactgaaaatacaaaaattagctgggtgtgggggtgcatggctgttatcccagctactcaggaggctgaggcaggagaatcgcttaaacctgggagtcggcggttgcagtgagccgaaatcacgccactgcactccagcctggtgacagagcgagactctgtctcaaaacaaaacaaaacaaaacaaaacaaaacaaacaaaaaaacaagaagatttgagcagtatttatccatagaaatttggggccacccgattctaaatttgcagtttttattttttttttagacagggtctcactctgtcacccaggctggagtgtggtggcgcaatctcagctcactgcaacctctgcctcttgggtgcaagtgattctcctgagtagctgggattacagatacccatcaccatgcctggctaatttttgtatttttagtagagacggggtttcgccatgttggccaggctggtcttgaactcctgacctcaagtgatccacctgcctcggcctcccaaagtgctgggattacaggcatgagccactgcgcccggccctgaatttgcagagttctgattaatgaagttttgttctttcactgtgccctgtaattcagtaattctgtaattcagttcagatacagatagtgctgagtcaggttggggtctctactattgctacccctctccagtcaccccctgtttgcagaagagtagggaatggcctggacttgggatttggcataggagggtctggcatcaaaccatggttctgatgctttactggccaagtgatcgagtgatctttcattccccaagcacttattgagggccagcactgggttggtgctggaaagacaaagataaataggacacaatttcctcccttcctccttttcttttttcttttcttttctcttctcttcttttctttttttctctctctccctctttcttttactgaggagttcttttaactatgtcaatcagaaaaatataaagtattcagaataataaaatgaacacccatgataagaacatcccgcttaagacataaagcggctgagtgtggtggctcacccctgtaatcccaggattttgggaggccgaggtgggcagatcatgaggtcaggagatcaagaccatcctggccaacatgatgaaaccccgtctctactaaaaacacaaaaattagccgggcgtgatggcatgtgcctgtagtcccagctacttgggaggctgagaaaggagaatcgcttgaactggggaggcagaggctgcagtgagctgagatcgcgccactgcactccagcttggatgacagagtgagactttgtctcaaaaaaaagaaagaaagctagaaatacttattattattattattttttgagacggagtctcgctctgtcacccaggctggagtgcagtggcgtgatctcggctcattgcaacctccgcctcctgggttctcgccattctcctgcctcagcctcctgagtagctgggactacaggcacctgccaccacacccggctaattttttgtatttttagtagagatgggatttcaccgtgttagccagaatggtctcgatctcctgacctgtgatccgcctgcctcggcctcccaaactgctgggattacaggcatgagccaccgcgcccggcctcttattatttttttaacttttagagacagagtctcactctgttgcccagactgaagtgaagtggcttgatcacagctcagtgcaatctccaactcctgagctcaagcaatcctccagtgtcagcctcctgagtagctaggactacaggtacacactaccaagcctggttaatttttaaatttttttttttttttttgagacagagcctcgctctgtcgcccaggctggcgtgatctcagctcactacaacctccgcccctcgggttcatgccattctcctgcctcagcctcctgagtagctgggattacaggcgccggccaccacgcccggctaattttttgtatttttagtagagacggggtttcacagtgttagccattatggtctcggtctcctgacctcatgatctgcccgccttggcctcccaaagtgctgggattacaggcgtgagctaccacgcccagccaatttttaaattttttgtagagatggggtgtcactatgttgtccaggctggagtcaaactcctgacctcaagtgatcctcctacctcagcctcccaaaatgctaggattataggcaagagtcaccactcccagcctagaaaaacttttgaaactttttcctttgtgcatatctcagtcccttctctcccactgaaggaaaatctctgttatgcattcagtgttatcactcctctgcattttttttttttttttgagacgaagtctcactctgtcacccaggctggagtgcagtggtgcaatctctgctcatgtgaatctctgcctcccggattcaaattattctcctgcctcagcctcccgagtagctgggattatgggtgcctgccaccatgcctggctaatttttgtatatttagtagagatggggtttcaccatgttggccaggctagtctcgcactcctggcctcaggtgaaccacccgcctcgtgggattacaggcgtgagccaccgcacctggcccactgcatgtcttttatttgtactacctaggtatgtatacttaaataatatgtagtcttaagcactttaaaaatttttatgaatcatactaccaaaatcttataacttgctgcttacttaaaacgttttaagatttatttatgtgggcggggcacagtggctcacgcctgtaatcccagcactttgggaggctgaggagggtggaccacctgaggtcgggagttagagaccagcctggccaacatggagaaaccccatctctactaaaaatacaaaaattagccgggcatggtggcacgtgcctgtagtctgaaggaggctgaaacaggaggatcgcttgaacccgggaggcggaggttgcagtgagccaagatcacgccaccacacgtcagcctgggtgacaaagggagactctgtctcaaaaaaaaaaaaaaagatttatttatgtgatacatgtagctccattcattcgtctttgttctttgtcttattttatattaagggtaatttttttatggaagtatacaacatttatacaaaaaaagtagataaatagtaagtgtacagcttaatgaattttcatagtcaacacacctatgtaaccacacccaatgaagacacaactggccaggaatggtggctcatgcctgtagtcccatcacttttcggggaccaaggtaggcagatcacttgagcccaggagtttgagaccagcctgggcaacatggtgaaaccctgtctctaccaaaaatacaaaaaattagccgggtacagtggcatgtgcctgtggtcccagctgcttgggaggctgaggtgggaggattgcttgagcctgggaggcgaaggctgcagtgagctgaggtctcacaatagcactccagcctgggcaacagagtgagacctcatctcacaaaagaaacaaagaaaaagagaaacaactctgtctgtactcagaaccagccaagccctgtttttttttttttgttgttgttgttgtttttgagacagagtctagctctgtcacccaggctggagtgcaatcgcacgatctcggctctcagctcactataacctctgcctcccaggtttaagagattcttctgcctcagcctcctgagtagctgggactacaggcgtgcaccaccacgcccagctcatttttgtgtttttagtagagacagggtttcaccatgttggccaggctggactcgaactcttaacctcaggtggtctgcctgccttggcctcccaaagtgctgggattacaggcataagccactgtgcccagccccaagtcctgtttttaataactgttccccaaggtaacctccatcctgacccctaacatagattagttggctgttttggaattttctatgaaaataaacatgctatatgtacccctttggtgctcagtttctttccttcaacattatatctgtgagatttatccatgttgttatgagtagtagctgttcattctttttcattgctgtataatattccattgaattaataaactaaagtgccttcattcattctgctgctgctggacatttgggttgcttccagtttggggttattatgtatgattagtgtttctatgaaaattattttacatgtcttttggtacacatgtgcatgcattcctcttgagtttatatctaggattggagttgctgggtcatactatataaatatattcaattttaacagaaaatgttaaatggttttccaccctcaccagttcagtatgagaattcctttgctccacgtacttggcccacacttggtgttgactgcttttttcattttagccattctagtggagatggacttccttgttttgttttgttttgttttgttttgagatggaatttcgctcttgttgcccaggctggagcgcaatggcatgatcttggctcaccacaacctctgccttccaggttcaagggattctcttgcctcagcctccccagtagctgggattacaggcatgcgccaccacgcctggctaattttgtattttttgtagagacggggtttctccatgttggtcaggctggtctggaactcctgacctcaggtgatctgccctcctcagcctcccaaagtgctgggattacaggggtgagccacctctcccagcccaacttccctgttttaagttaaatttattgtgctaagcattttacatgcattttttttttttttttggagacagagtcttgctctgttgcccaagctggagtgcagtggtatgatctcggctcactgcaacctccgcctcctgggttcaagtgtttgtcatgcctcagcctcccaagagctgggattacaggtgcatgccaccatgcctggctaatttttgtgtttctagtagattgggtttcacgatgttgaccaggctggtctcgaactcctgacctcaagcaatctgccagccttgacctcccaaatggctgggattacaggcatgagccaccaagtcaggcctttatatcatcttctttttttacctacatatcaactccatgaggaaggtattgctgttaaccctgttttacagatgggaaactgaacttaaagttagggaacttcaaggccacatagtgagggctagtgcagaacctccaggctttactgtccctattgctgtggtctgtgccatctggtagtggtggagggggtcccacgaagacaaattactggaagccgatgacacaaatacagtaactgggatattattcgaggtgcactgggggccccaaagccgaatgagatgaattccactgcacgggctggaaggagtcacagagaaggcctggattgaactgaatctttggacaaatttagagtgatagtacccatctctgatggtcctagtgaggatttaaggtgctttaagcattaggtaaagctcctggtactcgcacatagcgggtgctcagtgaagggctgttgaaggaattagtgaacgcatgtaggatcgggagacctatgcacagttatggtctttcctggagccaggggatggacaaaatgacctctctaggcctctttcgtcctgagtttgagtaggtcaggggaaagcctagggtaaagggccagctccactagcccaggcagggaatgactccccctgcccagcccctatgactaaggggctgtgagagcaactcctttctagacaaggaagaaataatgtcacagggcattgtctgcgctgctccccagcaccctgttaccccttctccagctctaccctgagctctggatccagcagaaggaactgaagtctaggacccacaacccccagaaaaaggcccaggcagggggatgggctggggaggtgtgtgtttgttttgaaagcctgtagaggaggaggaggagggggaggagagggagatggggtggaggagagtaggaggtggaggagaggaggaggaggaggaggagagggagatggggtggaggagaggggtaggattaatttgcagcttagattttagggccaaggattgaagcctcttcctgcactcctcccctcctccacttggcattatcccaaggagttgccttggggcttccgtgatggcgacgggaatgcggggaagttgagggcctgggagcccgaggccagatggaggcaaagaggagtgaggctgctcacagaccctggtgggctgggttctggaagaaaaccatgggctgaccagctccagggcctggctgagcctcagccaggttctgccagagctggctcaacagcggcacctgccggctggggccctctctgcggggaagggctcctccaccgccctgggagccccgcgggtgagtcgctcctggcctggctctgtggcctccccagaggtcagatcaggaaatgttgcgagccgaggaatgttctgaagcggagggcctctgcccttctggcctccacctgtgcccctaacactaccctgttcacccaggacactaaccgagggccagggctgggggaaaaagagtaggatgaaggccactcactttagggaggttcctggtttgggtagttattattattattattttttaatttggaaatactttaaagcttacagaagagcttcaagaatgatacaaagattcttcctcccttacctagatttatcagttgataacattttgccccatttgctttctttctctctttgtatatacagtagataaaaacgtagttttagttggttgaacgtgggggacaagaaaatgaaaaataaaaaattaacaaaacaacatagttttaggccagcagcagtggcccatgcctgtaatcccggtactttgggaagccaaggcaggataatcacttaagcccagaagtttgagaccagcctgggcaacatagtgagacctcgtctctgcaaaaaaataaacaaaattagccagctgtggtgatgtgtaactgtagtcccagctactcaagaggctgaggtgggagggtcgcttgagccagcgagattgaggctgcagtgagccatgattgcgccactgcactccagcctgggcgacagagcgtggccttgtctcaaaaaacaaaaaacaaaaaaacaataaaagcatagtttttttttggtatattaactgaactgaaagtggcagccatcatgcccctttgcccccaaatacttcagtgggtattacctaagaacaaggatattttctcgcatcaccacagttcagtgaaatttaacatcaatacaataatttactgtctatattccaatttttatcaataaggatcctttagaatattttttccctgtagtataagatccagatcaggatcacacattgcatttaattggcttcctcttctcctttttttttgagacaatgtctcactgtgtcacccagcctggagtgcagtggcgtgatattggctcactgcagcctctacttcctgggctcaacagatcctctcacctcagcctcctgagtagctgggactacagcgtgccagcacacctgactaatatttcttttcttcttttagaaatgaggtctcggccaggtgcggtggctcacgcctgtaatcccagcactgtgggaggccgaggcaggcagatcacgaggtcagaagatcgagaccatcctggctaacacagtgaaaccccgtctccactaaaaatacaaaaaattaggcaggcgcctgtagtcctagctactcggaaggctgaggcaggagaatagcatgaacccgggaggtggagcttgcagtgagctgagatcacgcaactgaactccagcctgggtgacagagcgtgattccgtctcaaaaaaaaaaaaaaagaaaaagaaaaaaaagaaatgaggtctcactatgttgcccaggctgatctacccacctcggcctcccaaagtgctgggattacaggcgtgaaccactgtgtccggccatttttcttcttcttcttcttttttttttttttgagacggactcttgctctgtcgccaggctggagtgcagtggcgcgatcttggctcactgcaacctccgcctcttgggttcaagcaattctcctgcctcaacctctggagtagctgggattacaggcacttgccaccatgcccagctaatttttgtatttttagtagagatggggtttcatcgtgttggccatgatggtctcgatctcctgacctcgtgatctgcccacctcggcctcccaaaatactgagattacaggcatgagccaccacgcccagccatttttctattttttgtagagacaggggtctccctatgttgctcaggctggtcttgaactcctgggctcaagcaatcctcctgcctcagcccccaaagtgcttgctgggatttcaggcatgagccaccacacccagatatttaggcttctttattttttatttatttttattttttgagactgagttttgctcttattgcccaggctggagtgcagtggtgcgatatcggctcaactgggttcaagtgattctcctgcctcagccacctgagtagctgggattacaggtgcacgccaccacacccagctaatttttgtacttttagtagagatggggttttggcatattggccaggctggtctcgaatttctggcttcaggccatctgcccatctcagcctcccaaagtgttgggattacaggtgtgagccaccatgctggcctaggcttctttaatctggggcaattcctcatctttttcatctttcatgacattttttcagagtaggactcccccacacatttttccttttaatcgaatgcaccttatttgaggtttgtctggtatttccttatggatagattcaggctatgtctccctggtgcaaatataagcaatattatattgtttgggtggagttctctccactttaagggattcatggaacttctgaacctctgaggttgattaacccctgagttgtctgtcaaaaaaatcagattttcaaaacaagttaagaaggacatcatgaattatgcgtgtgtcttcactctgctgatggctggcttaggctctgcattctctctctccctcttcccctcccgctaccgaacttgcccttgaaatttcagcagctgctgttgaaagcattctttttgaaggccactagggacccctaattgcccaactcagtcgctttcatagtcttcatcctcttgacctcttctcagggcaacggactggctcacccgcccttctccctaaaaccacagaaggccgcgcttggctgtcccagtctctgcccatttccttcaacaaaaatgacagaatgccggctgctctgggaggtacagaggtggatccactgtggagccagctttgcaggtggtggcttgtcaggaaaattctgcaggtcctggtctttttttcttttcttttctttcttttttttttttttttttgagactgagtctcactctattgcccaggctggagtgcagtggcatgatctcggctcaccgtgacctccgcctcccggattcaagtgatcctcttgcctgagcctcccaggtagctgggattacaggcgcccaccaccacgcccagcttattattgtatttttagtagagacagagtttcaccatgttggccaggctggtctccagaactcctgacctcagctgatctagccgccttggcctcccaaagtgctgggattacaggcatgagccaccacacccggcctggtcctggtatttcttgtatactccccacaccccagtgaagatgttctctcagcttttgtcctcagatggggtgcctggaattggtctttcccctggaggagccccaccttctagtggtttcaactttgcctctccttcaacaacccaggagggcagccctgagtctctgaccctgactcagtggatgtccaggcagaattatgtcaggaatggatctgggcttagtgtttcttcctcagcagcccctagggcaaacagacctcccctcatactcctttcccaggccgtgagctctttttaggcaggttggggtctaattcttctctatccctcggcactgggcatgcagttggccctccatcaatatttatggaataatggccaggcgcagtggctcatgcctataatcccagcactttgggaggctgaggcgggaggattacttgaggtcaggagttcaagaccagcctggtcaacatggcaaaacccagtctctactaaaaatacaaaaattagctcggtgtggtggcgcatgcctgtaattccagctacttgggagactgaggtaggagaatcatttgaacctgggaggcggaggttgcagtgagccgagattgggtcattgcattccagcctgggtgacacaatgagactctgtctcgaaaaaaaaaaaaaagttatgcaataatgagcaaagaggttcagggcttgcctaaggcttggccttgctcttggctttcatcacagggacctacatgttggctggctgttgggagggagagctttggaaactggctgtccctggtacaggggaaacagtgaagaaagctgggtcccaatttctgggttattgtctcggctctgccattttctttttcttttttccccccagttattgtttcctgttttttctttttcttttttttttattttttgagacggactctcgctctgtcacccaggctggagtgcagtggcacaatctcggctcactgcaagctccgcctcctgggttcacgccattctcccgcctcagcctcccgagtagctgggactacaggtacccgccaccacgcccggctaattttgtttttgtatttttagtatagacagggtttcaccatgttagccagaatggtctcgatctcctgacctcgtgatcctcccgccttggcctcccaaagtgctgggattacaggtgtgagccacggtgcctggcctgttttgttttgtttttgtttttgtttttttagatggagtctcactgtgtcacccaggctggagtgcagtggcacaatctcggctcactgcaacctctgcctcctgggttcaagtgattcccctgcctcagcctcccaagtagctgggattacaggcacctgccaccacgcccagctaatttttgtatttttagtagagacgaggtttcaccatgttggccaggctcatctcaaactcctgacctcagttgatccacccacctcggcctcccaaagtgctgggattacaggcgtgagccactgcgcccagcccgttccttttataaattatttcagtaggcttttggggagcaggtggtgtttggttacatggataagttcttcagtggtgatttctgagattttggtgcatccaccacccaagcttgtacactgtacccagtgtgtagtcttttatccctcgcccccgctcccaatcttcccctagagtccccaaagtccattgttcattcttatgcctttgtgttctcttatacgtgagaacatatgtttgattttccattcctgagttacttcacttagaataatggtctccaattctatccaggttgctgcaaaggccatgattttgtttctctttttttttttttttttgagacagagtttcgctcttgttgcccaggctagagtgcaatgatacaatctcagttcacagcaacctctgcctcccgggttcaagtgattctcctgcctcaacctcccgagtagctgggattacaggcatgtgccaccacgcccagctaattttgtatttttagtagagatggggtttctccatgttggtcaggctgacctcgaactcctgacctcaggtgatccgcccgccttggcctccgaaagtgctgggattacaggcatgagcctgtatatatgacattttctttacccactcattgattgatgggcatttgggctagttccatatttttgcaattgtgcaattgtgaattgtgctgctataaacatgagtgtgcaagtctctttttcatataatgacttctttccctctgggtagatacccagtagtgggattgctggatcaaatggtagatctacttttagttctttaaggaatctcctggcccggtgcggtggctcatgcctataatcccagcactttgggaggcccaggtgggcagatcacgagctcaggagatcgagaccatcctggctaacacggtgaaaccccatctctactaaaaatacaaaaaattagccaggcatggtggcaggcgcctgtagtcccagttacttgggaggctgaggcaggagaatggcatgaacctgggaggcggagcttgcagtgagctgagattgcgccactgcactccagcctgggtgacagttcaagactccatctcaaaaaaaaaaaaaaaaaaaaggaatctccatactgctttccatagtggttatactagtttacattcccaccagcatcataaaagtgttctctttttactacatccatgcctacatctattattttttgatttttaaattatggccattcttgcaggagtaaggtggtatcgcactgtggttttgatttgcatttccctgataactagtgatgctgaacattttttcatatgtttgtcggccatttgtatatactcttttgagaattgtctatctattcatgtccttagcccactttttgatgggattgtttgtttgttttttttcttgctgatttgtttgagttccttgcagatttgggatattagtcctttgtcagatgcatagtttgtgaagattttctgccactctgtgggttgtctatttactctgctgattatttcttttgctgtgcagaagctttttagtttaattaagtcccgtctatttatctttgtttttgttgcatttgcctttgggctcttggtcatgatgtctttgctgaagccagtgtttagaagggtttttcaaatgttatcttctagaatttttatggtttcaagtcttagatttaagtgtttgatccatcttgagctgatttttatgtaaggtgagagataagaatccagtttcattcttctacatgtggcttgccaattatcccagccaccatttgttgaataaggtgtcttttccccactttatgtttttgtttgagttgttaaagatcagttggctgtaagtatttggatttatttcttggttttctattctgttccattggtctatgtgcctgtttttatacaagtaccatgctgttttggtgactatggccttataatatagtctgaagttaggtaatgtgatgcctccagattggttctttttgattagcattgctttggctatgcaggctcttttttggttccatgtgcattttttttttcagatggatttttttttttctgtcgccaggctggtgtgcagtggcacaatctcggctcactgcaacctccgcctcccaggttcaagtgattctcctacctcagactcctgagtagctgggactacaggcacgcgccaccatgcctggctaatttttgcatttttagtagagacagggtttcactgtgttggccaggatggtctcaatctcttgaccttgtgatctgcccacctctgcctcccaaagtgctgggattacaggtgttagctaccatagccagccccacatgaattttaggattgtcttttctagttctgtgaagaatgatgatggtattttgatgggaattgccttagagttttgaatttcttttggcagtatggtcattttcacaatattgattctaaccatccatgagcatgggatatgtttccatttgtttgtgtctatgatttatttcagcagtgttttgtagttttccttatggaggtctttcacctccttggttaggtatactcctaagtattttattattattttttgcagctattgtaaaaaaggttagattcttgattctcagtttggtcattgttgatatacagcagtgctactgatttgtgcagattgattttgtatcctgaaactttactaaatttgtttataaaatctgggagctttatggatgaatctttagagtttttctaggtatatgaccatatgattggtgaacagcgacggtttgacttcctctttaccaatatggatgccttttatttctttttttttttttttgagatggggtcttgctgtctcccaggctggagtgcagtggcgcaatctcggctcactgcaagctaccccccggctgggttcatgccattctcctgcttcagcctcccgagtagctgggactacaggcgcctgccaccacgcccggcttatatatatatatatatatatatatatatatatatatatagtatttttagtagagatggggtttcaccgtgttcaccaggatggtcttgatcttctgaccttgtgatccgcccgcctcggcctcccaaaatgctgggattacaggtgtgagccactgcgcctggcctggatgtcctttatttctttctcttgtctgattgctctaggtaggactctgccattttcttgaccttggatatgtcactaagcctctcagcgccccagtctccgcatcttaatgaaataatgggactagtaacaccaacctaaatgtattgccacaaggatgaaactaacaagaccctttcacaggcccagtgcctggtgttcagcgggtcttcgataattgttccttctgttagcattcattaaacacctactgtgtaccagatgccaggttgtgctcccctagccccaagaatggacctaggttttctaggtggcccccttagtccactctctcctcttagctcagcagctctgggcagctgtgagtcccagtctatttggctgcagattggatgggacctcacctgccctagtttgtttgtttgcttttttaagatggagtctcgctctgtcgcccaggctggagcacagtggcatgatcttggctcactgcaacctccacctccctggttccagtgattcacctgcctcaacctcccgagtagctgggattataggcacctgccaccacttctggctaattttttatttttagtagaggtggggtttcactattttggccaggctggtcttgaactactgacctcaaatgatccacctgcctcagcctcccaaaatgctgggattacaggcatgagtcaccacacctagcctgtttattttttgagacaatttctcactctgtcacccaggctggagtgcagtggtttgatcacggctgactgcagccttgagctcctaggctcaagcgatattcccacctcagcctcttgagtagctgggacaacaggcacacaccaccatgccttgctaattttttagtttctatagagacagggtctcactatgttgcccaggctcatcttgaactcctggtctcaagtgattctccgccttgggctcccaaagcagtaggattacaggcaggagccactgcagccggtccccatctgccctactttttgtaagacttagggccttgaaagaaatgactacattttcctcttctggctgggttgtcagagctgtttcagacagactgacagaccagtaaaggtgacagctgtggtttgtagcctctcaggtcagtcagacacagccagagtgagagaagtgaccaaatgtctccttggcagaccgtttcgaagattaagacacttaatctaagattaagatttggaggctaagtgtggtggctcatgtctgtaatcctagcactttggaggctgaggtgggaggatcacttgaggcccaggagttggagaccagcctaggcagcacagggagaatctgtttctacaaataattaaaaaaaaaaaaaattagctgcgcatggtggtgcacgcctgtagtcccagcaactcaggaggctgtggtaggaggattgcctaaacccaggaggtggagtctgtagtgagccatgattttgtcactgcactccagcctgggcaatggagcaagactttgcctcaaaataaataaataaataggccaggtgcagtggctcacacctgtaatcccagcactttgggaggccgaggcgggtggatcacgaggtcaggagattgagaccatcctggctaacacggtgaaatcccgtctctactaaaaatacaaaaaaaaaaaatacaaaaaaaattttttgagacactccatctcaaataaataaataaataaaataagtaaaaatataaacatttgttgttaaccaagaaactcctcctggcctccctcagctgtcccctcagaggcaccatgaaaagcaagagggctaacgtgggtttgaatcctggctctgccactttataagtgggtgacttgagttacttcatcattagcagcctcagtggccactaatgtaaaatgaaactagaataatctccagttcacagggtttctgtttgtatctcatcctttggattctctcttcccagactcagtgatcactctcaaactcagcccttgaatttttgttttttttgagacagggtctggctctgttggccaggcagtgcagtggcacaatcatggctcacttcaccctctacttgcctggctcaagcaatcctcctgccttagcctcctcagtagctgggactacaggtgtgcaccactacacctggctaatttttaaacttttttttttttttttttgagatggagtgtcactctgtcacccaggctggagtgcagtggcgcgatcttggctcactgcaacctccgcctctcggctgattctcctgcctcagcctcccgagtagctgtgactacaggtgcacagcaccacagctggctaatttttgtatttttagtagcgatggggtttcaccatattggttagtctggtcttgaactcctgacctcatgatctgcctgcctcggcttcccaaagtgttgggattatgggcatgagccaccgcgccaggcctttttaaacactttgtagagacggggttccactgtgttgctcaggctgtcctcgtactcctaggctcaagtaatcctcctgccttggcctcctgagtagctgagactttgggtttgtgctaccatgcctagctaattttttttttaatttttagtagagacaaggtcttgctatgttgctcaggctggtctctaactcctggactcaagccgtcctcccacctcagactcccaaagtgctgggattacagatgtgagccaccacaactggccagtcctttagtctttacccctcctcctttgacctcagaactgactattgccaagtttgtcctgcagataccttccctccaagcaattgctgcatattcatcatcctcaccttcacttccatttttagggcactgtgtgctcagaactttatacatggctttttttgtttgtttttgagatggagtcttgttctgtcgcccagactggagtgcagtggcatgatctcagctcactgcaacctccacctcccaggttcaagcgattctcctgcctcagtctcctgagtagctgggaccataggtgcccgccaacatgcctggctaatttttgtatttttagtagagacagggtttcaccatgttggccaggctggtctcaaactcctgacctccggtgatccgcccgtctcaggctcccaaagtgctgggattacaggagtgagccatagcgctcgggctatacaaggtatttttgatgttctgttgtagatattttctaatttctgttaggagttcttcaagccacaaatttttaattaattcattcattaatttatttattttgagacagggtctctgtggtccaggctggagtgcagtggtttgatcatgaatcactgcagcctttaactcctgggctcaagcaatcttcccacctctgtttcccgagtagctgggactacaggtgtgcgccaccatgccaggctatttttatttttaattttttttatagagacagggtctcactatgttgcccaggctggtctcaaactcctgcactcaagcgagtctcctgcctcagcctctgaaagtgctgggattacgagcattagccactgtgtccagccccatgaattatttagaagtgcattttgacttttttttgagacggagtcttacactgtcacctgggttggtgtgcagtggcacgatcttggctctctgcaacctccgtctctcgggttcaagcgattctcctgcctcagcctcccgagtagcaggattacaggcgcctgccatcacgctcggctaatttttgtatttttagtagagatgaggtttcactatcttggccaggctgatcttgaactactgacctcatgatccaccctctttggcctcccaaagtgctggcattacaggcgtgagccactgcgcccagtgcattttgacatttaaaaatgcatggggttgtttatttttaaaaattattgatttctaatttaattctattgctgttagaaaatgtggtctatatgatattttgagttgatggagactacttgctttatgatctgatatgtggtcatttttgtaaatagtccgtgtgtatctgaaagtaaaagtgtgttcactaattgtttgaactggagtatttaaaatattctattagattatgcttgctgattgcatcgctcaaaccttttaaatccttactgaatgttttgtctgcttgatgtaccagatccagagggaggtgatttaaatcttccattggtagatttgtctatttttcccagtatttctttcttttttttctttctttttttttttttttgagacggagtctcgctctctcgcccaggctggagtgcagtggtgcgatctcggctcactgcaagctccgcctcccgggttcacgccattctcctgcctcagcctcccgagtagctgggactacaggcacccgccaccaccctcggctaattttttgtatttttagtagagacggggtttcaccgtgttagccaggatggtctccatctcctgaccttgtgatccgcccccctgggcctcccagagtgctgggattacaggcatgagccattgagcccggcctatttttcccagtatttctgttttatgatttttgaagctatgttattaggtacatacaactgtagaatggatatatctttttttttttttttgagatggagtctcgctccgttgcccaggctggagtgcagtggcgtgatctcggctcactgcaagctcagcctcccgggttcaagcctttctcctgccttggcctcccgagtagctgggactacaggcgcccgccactatgcccggctaattgttttgtatttttagtagagacggggtttcaccgtgttagccaggatggtctcgatctctcctactaaaaaaatacaaaaattagctgggcatggtggcatgcgcctgtaatctcgatctcctgaccttgtggtctgcccacctcagcctcccaaagtgctgggattagaggcgtgagccactgtgcctggcctagaatggatatatcttattgatagattgaggtaagcaagtatccctagcatctctctctgctgggtagatgttttttccattactatcgaaggatatcaccttttgggcacccttgactttttctttctttctttttaaaatttttttttgagacagggtcttgctctgtcacccaggctggagtgtggcggcatgatcttggctcactccagcctctgtctcctgggctcacgtgatcctcccacctcagcctcctgagtagctgggactacaggtgtgtaccaccatgcctggctaattttaagtatttttttgtagagatggtgtctcaccatgttgcccaggctgttcttgaactcttggactcaagcgatccttctgcctcagcctctcaaagtgctggaattacaggcttgagccaccacgcctggttcactcttgacttttttgaagggtacgttatctctgatttaatttcctcctctttatgagaccccaggctttgtcttgttcctttctggatttgtgcctttgtggagtcttgttttcttgctggcttagccttgcattgaaaataacacacatgtctgggcgcagtggctcacgcctgtaatcccaacactttgggaggccgaggtgggtggatcagttgaggtcaggagtttgagaccagcctggccaacatggtgaaaccccgtctgtactaaaaatataaaaattagccagggatggtgatgcacacctgtagtcccagctactcaaggctcaagaggctgaagcaagagaattgcttgaagccaggaggtggaggctgcagtgagccaagatcacaacactgcactccagcctgggcaacacagcaagagaaagaaagagagaaacagagaaacagagagagagagaaagagaggaagagagaaagagagagaaagaaagagagagaaagagagaaggaaggagagggagagagggagggaaggaaggaagcaaagaagcaaagaaggaaagaaggaaaggaaggaaggaaggagacccatatacattttttttaaattttttatctagcatttctagctgttttgtacacaagagtttttctgaacatatatagtccaccttattgctggaaataaaagtctctgctaagtgctttacataaaattgtattgaacattcaaaacaattcaataaaatcatgtcaccattttttttttttttcagagaagaaaacagaggctcagggagtttatgactgcattcagatcctagttctgacatttaccagcaatatgacattgaataagtcagtcactccagaggacaccgagctcagtgagcacattggcgaggcctgccctgccgggatgctgtttgccttacagtaacacgtagaatgcctcagtgtctggcacagcactggtactcagaagacgtcagtgatgactgctgtctaaagggaagggatatgtacctgggacatgtagcctgtactctcttcactgggaagcattgacaaggacaggtcagtaactgactgaattacctggaggactttaaaagacacagatccctgaccgtactccccccagattctgattgtgatacatggccgggtttgggagcctgtgtcactggggtatggctcatgcggtctttgctggtccactccctggggctgtcctctagtgagttacatagaaaggatagcgttgggttgggtgcagtggctcacacctgtaatcccagcactttgggaggccgaggtgggcggatcacaaggtcaggagttcgagaccagcctggccaatatggtgaaaccccgtctctactaaaaaaatacaaaaattagccgggcatggtggcatgcacctgtaatcccagctactcaggaggctgaggcagaagaattgctttaacccaggaggcggaggttgcagtgagctgagatcacaccactgcactccagtctgggcgacagaacaaggctttgtctcaaaaaaaaaaaaaaaaaaaagaaaggataacgtagtgactatcacgagttgccaagaagagggagagagcagccctcgtggttaaatagcaagcaatttgctttaattttaatttactttttttttttttgagagggagtctcgctttgccacccaggctggagtgcagtagtacaatttcggctcgctgcaacctctgcctcccgggttcaagtgattcttctgcctcagcctctctagtagctgggactacaggcacacactgccacacccagataatttttgtatttttagtagagatggggttttaccatgttagccagtctggtctcgaactcatggcctcaagtgatctgcctgcctcagtctcccaaagtgctgggattacaggtgtgagccttgtgcccagccaccttttcatttttttgagacatagtctcactgtgtcgcacaggcaggagagcagtggcgcgatcttggctctctgcagcctcaacttccctggctcaagtgactttcccatctcagcctcccaagtatctgggactacaggagcgtgtcaccgtatatggctaatttttttttttttgagacggagtcttgctctgttgcccaggctggagtgtagtgtagtggcgtgatcttgactcactgtagcctctgcctcccgggctcaagcgattctcctgtctcagcctcccaagtagttgggattataggcacctgctgccattcccagctaatttttgtatttttagtagagatgaggtttcaccatgttggccaggctggtctcggactcctgacctcaagtgatctgcctgcctccgcctcccaaagtgctgggattacaggtgtgagccaccgcacctggcttatggctaatttgtaaactttttgtagaaaggaggtctcactatattgcccaggctggtctccaactcctggggtaaagtgatcctcctacctcaacctcccaaagtactgggattacgggcatgagccactgcacctgaccttaatttaactttttgaataggtaatatatgtacatgtttcaacaaccaaaatgaaatataaagaaattcactggaaagctctgttcccaccctgtccttgcctacccccgcaacaggattccccagctccctataggtcacccactgttattgctttccctatgcaaattcaagcaaatataaacatttatttttatttccacctccctttcattcattggctacgatactaccactgtgcaaagctcttttctttttttttttgagacagggtctcactctgtcactcctgctgtctccctctgtcacccctgctggagtgcagtggtgcaatcttggctcactgcagccttgacttccccagctcaagcaaccctcccactttagcctcctgagtagctgggactacaggtgcgcactaccacgtccaactaatttttgtattttgtgtagagatggggtttcaccatgttgtccaggccggtctcacatttctgcaagtgatctgtcccccttggcctcccaaagtgctggtattacaggcatgagccaccacatccagcctcctctacctgcctttctttttcttttttttttattttttgagacggaatctcgctctgtctcccaggctgaagtacagtggcgcgatcttggctcactgcaagctcagcctcccgggttttacgccattctcctgcctcagcctcccgagtagctgggactacaggagtgcaccacctacgcccggctaattttttgtatttttagtagagacagggtttcaccgcgttagccaggatggtctcaatctcctgacctcgtgatccgcccacctcggcctcccaaagtgctgggattacaggtgtgagccactgcgcccggcctacctgcctttctttcaaaaaagatgacatactatgtatactgttctgaaccacatttttttttttgagacagagtttcgctcttgttacccaggctgaagtgcaatggcactatcttggctcaccgcaacctccgcctcctgggttcaagtggttcttctgcctcagtcttctgagtagctgggattataggcatgtgccaccacacccagctaattttgtgtttttagtagagatgaggtttctctatgttggtcaggctggtcttgagctcccaacctcaggtgatccacggtcctcggcctcccaaagtgctgggattacatgtgtgagccatcgtgcctggcctttttttttttttttagatggggtcttgctctgtcacacaggctggagtgtggtggcacaatcacagcttactgcagcctcaacttccctggctcaagcaatcctcccacctcagcttcctgagtagatgggactacattcatataccaccatgctgtcttttttttttttttcactttctgtagagacggaagtctcattatgttgaccaggctggtcttgaacccctggactcaagtgatcctcctgcctcggcctctcaccttggcctcccaaagtgctgggattattggcgtgagccactgcacacagcctgtaccacatttttgtttcaaaatatatcctgaagatctttccatttttcttggcatccttattattttttttttttacagctgcatagttttccattgtggggctatatcataatttactgaacccttcactgtccaatatgtagccacacatggctacttaaatggaaattaattaaaattaagtaacatttatttatttccttagttgaactagctacagcttgaatactcggtagctacgagtggccagtggctgccatattggacagggcagatagagaacattttcatcattgcagaaagttctataggacagtggtttaactgatcccctaaagctggacacctagtttgtttccagttctcaggcagcttggggatgatggggcccatccctggaatgcagcagagctgggtgaaagctgcactgggagttctgggccttcaacctcagaccttgcaacctgggaggctcctgcaagaggaaggcttttggatttggggcagaggcttgaccagggtctggaagagaaagtggccctaaagagcagtcctccttggaggttgcagtgagctgagatcgcgccactgcactccagcctgggcaacagagtgagactccatctcaaaaaaaaaaaaaaaaagcaggcctcctgttcaaacctaaccttttaccctctccctcccagcctgccaaaatgcagctctgtttctttcactcaatatttagcagacacttcttgagtaactcccaaggatggtgtcaagtccttcactggggatgtaggtatgagaaagacacagtcccttccttggagaaacccgcggcccaaagaaaaagacagatcatcaactgctctgtgagcaggacttttaaagagtcatcacctaagatcaaaaggcctgatattaacctgtttgtgaggatttggggaaacaggtgatctcatccgttgttggggattgtaaattggtacaaaatttttggagggcaattctgtgaaaacctataaaacatttaagagcacataatctttgacccagaattgccatacttataaatttatttcacacacacacatatgtctgcaaatatatgtaccaagatatttcctgtaattagcattgtttgtagtaataaaaggcggacatacataaatatccactaggaggggaatggtaaataaattgtgacacaccatacgatggaaaactatgttgactatctacaggcaggtatattatgacatgaaaatagcaggtgctgaacagtgtagagcgtgtgctatcatttgtgtcacacacacacgcacatatacacagcatatgctccaaatagctctgcaaagatacattagaactgttaagaggccaggcgcggtggctcacacctgtaatcccagcactttgggaggccaaggcgggtggatcacttgaggtcaggagttcaagaccagcctggccaacatggtgaaaccccgtctctactaaaaatacaaaaattagctgaacgtggtggcacacacctgtagtcccagctactcaggaggctgaggcaggagaattgcttgaatctgggaagcggaggtcgcagtgagctgagatcacaccactgcactccagccgcctgggcaacagagtgagactctgtctaaaaaaaaacaaaaacaaaaacaaaaaaactgttaagagtggttgcctctggggagggaatgggaaacagggcaacagggaggctgattggcaagagatctttcctttctttccccttccttccttccttccttccttccttccttccttccttccttccttccttccttccttcgagatggagtcttgctctgttgcccaggctagagtgcactggcgtgatcttggctcgcggcaccctccgcctcccaagttcaagtgattctcctgcctcagcctcccgagtacctgggattacaggcacccgccactacgccaagctaatttttatatttttagtagagacggggtttcaccatgttggccaggctggtctcaaactccagacctcaaatgatctacccacttcagcctcccagggtgttgagattacaggcttgagccatcgcacttggccaggagggactttactttctttgcacatgcttttgcactttgtttctcttttgaactgtgtaataacctttttccttttttttttttttttttgaggcagggtcttgctctgttacccaggctagagtgcagtgatgcgatcttggctcactgcagccttgacctctcaggctcaaataatcctcccacctcagcctcccgagtagctgggactacaggtgcgcaccatcatgcccagctgtttttttttttgtttttgttttttttttttttgcattttttgtagagatggggtctcaccatgttgcccaggctggtcttgaactcctgggttttagcgatcttccctcctcagcctcccaaagtgctgggattacaggtgcctggcccctttttcttttttttttttttttccctcaagacggagtcttgctctgtcgcccaggctggagtgcaatggcgtgatctcggctcactgcaacctcggcctcctgggttcaagcgattctcctgcctcggcctcccgagtagctaggattacaggcatgcgccaccacacccggctaattttttgtatttttagtagagatggggtttcaccatgttggccacactagtctcaaattcctgacctcgtgatctgcccgccttggtctcccaaagtgctaggattatagacgtgagccaccgcgcccggcccctttttcctttttttttttttttttttgagatggagtctcagtcggccaggctggagtgcagtggcgccatctcagctcactgcaacctcctctgcctcccgggttcaagcgattctcctgcctcagcctcctgagtagctggaactacaggcgcgtgccaccacgcccggctaattttttgtattttaagtagagacggggttgtgttagccaggatggtctcgatctcctgacctcgtgatccgcccgcctccgcctcccaaagtgctgggattacaggcgtgagccaccgcgcccggcctctcgttttccgtttttaaggaagctcctactgagtaatggtgaaggggagagaagagatccctgggaaaaccttatcaatcacctgggttctgaatattcccagtgactgcactgaaggtgacaacagtccagaaatgtcgccgctgcggtgaatccatccatcgcccctcgaagccttgccctatcttggctgtcataccgtctacggccagcagggggtagcacagatccaccaatgtgttagtcccaagcttcagtcatcccttctaggatttcctcctctgtgggccaagatgggaaagatacctcctgccaagcaaatgaaatttactacgtaataattgattccatcttctcattttttttgtaactcacagttctgatcagcatgagagagagggagaatgaatataggcttgcagaaacaataattttccacagaagaggtgttacttagcccagctttattccaccaggccttgggtgaagagtggctggcaatggcttgagaagcccccaggattgaagatacagtctgataactactgcattcgtggctccccgcctggcttgggtttccagctgcagggcacgctcctacccttctcttttcctctcacagaagtagttctgggcaagaggaagcatgaacagctggtcccataggatgacttgaagcagccactctcctagagaggttaaaagtctgtccctcgctaggctgcaagcagcccaaggaccaaggcatttctcatctgccacagaatctgcaggaccaagcacagtgatgggcatgtagctgatgctaagtaaaggtttattgttcaattgaaagagacagccattgaggaatcagggaatccattctttaaaaaaatgtgtttttattcattaaaaaaaaaagtcttccaggctggacggggtgcctcatgcctgtaatcccagcactttgggaggccgaggcaggcggatcacttgaggtcaggagttcgagaccagcttggtcaacatagcaaaaccccgtctctactaaaaatacaaaaatgagctgggtgtggtggcacgcacctgtggtcccagctactgaggaggctgagactggataattgcttggacctgggaggtggaggttgcagtgagctgagaccgagccactgcactccagcctgggcaacagcgagagactccatcttaaaagaaaaaaaaaagtcttccacgacagttatcttatagagacaagaagaagaagaaagaaggagaagaagaggaggaggtcctagctaatctcaagggcaaggacccaagggcaaggctctggtctgtctgagaaggagaatatggcagtgtgcagggaatggatcattttccctgcatgcccaaggagaattctgctttgactcaccttggaggtccttggtcaggccacgaaaccagtgatcacatctctcacccatctggggtgctggtgaccttggcagaagaaaggcttaaaccaggtcagcctgggggaaggggctggctccttccagggtcttcctccagattagatgttaactctccgtctcttgcttaaagtcttgtcagtggctctgaatgtgagggcagaaggaggaggatgctgtcaggggaggggacactaatggctcctgacctggcctagagataattcggggctccttcagcgggccctccctcctcagtgccctggaagtgtagggaggggtcagttggggatccccacaaattaaatggggaatgagaggagcaactgaaagtctcaaattcaggctatagatgggaccccagccccccatactctcccgtcctacatgagatgggcagtggagggccaggacagcaactccaagccagtgtaggttttggaggtagacagtgaggaggcttgcttctgtcctttgttagctgagtgcccttggacagcttacttacctactctcagcctcagtttccccatctctaaaataaggctaccaatacctaccttctctggccattgtcaggatgaatgaaagagctctgaaagtatttctgtaattagcagacatcagagattgttattctccaaggtaagaggcccccctagatccctggcggtgacagtgtcaagattctttttccctcctctgcggtgcccactccttttccagccttgtggctggctctcatcctcctttccgcaaccccccactcctccttgggaccaccttggcgggcccagcttctcgcagcctgccatattccataggtgcccccattctaaaacctgtaggggtgccctgcacaggcgcacggttggtcgaggtgggacaggtggcgggggtctccactggcctgcgtccgcgccccccaccctgtttaggagttcctgtttggagatggctccccctcgtcctcagctcgtctctgggctaagcaggggaggagagaaataaaaggtggggggcctggaagggggttcccaccttctcagtccgggacgcgagacgggaacgcagccctggcgccccaacgctgcaccaccgtgggtctccgagccgtgctcgcagtcgctgagatcctcggtgcggagaagatgtgcccctccaatccccaggccgtgatccccttcacccagacccggccaatccctcgcccgaggcgagcgggaggatgcggttctaggacccggaggcgccgccgagcgcgccgccgcctcggcctcgcctcggtggcctcccgctccggcaggtgaagcggcgccggccgccccctctgcggcaggtgaagcggctcggcagcccactccccgcccgccatggttgcgggggtcccccggccagcgcccgccccctccctccagcccgcccccctggggctgggtgcccggcggcggcggcggcgaactgcggtttgcgcgcacggggagcgacagcagaagttcgaaaatcgccgaggggggagccagcgccgcagcttcctgcccccggcccagccctctggccccggcggcctgcagcctgacttcctcccccaaccctgcagctcgccgcccggtcccacggacggggccgccccgatgggacgccgcgctccggcccctgcgcgccgctgagccgagcgccccccgctgccgagacccccgccgccaccgccagccgctgccccctcgcccccgcccgggccgggagcctcgtccccgtcccccggaaagctggatttccgaggctggaggcgcctggccggctgggtggggaccaccatgggcaacgcggccggcagcgccgagcagcccgcgggccccgccgcgccgccccccaagcagcccgcgcctcccaagcagccgatgcccgcggccggagagctggaggagaggttcaaccgcgccctggtgagtgcgacccggaggcgggtcgggcgcgggcggggggcggcaggggcgcggcaggggctgggcgcgcgtccccgcccccggggactcaggtgccgcttggagatccccggtccggcagctgccccctccaggaggtgggagcgacagtggcctttttttcagagtgacttagcactctccccccaaaactttcttcagttatcgcccggtctccctccctaagacgcctccaccccagctgggtcttaaggtctaaacaagtatgtcctgtgaagaagttgggagcggggcacgcacaggggtcccgggtcgcccccttccccactgcacgcaggcccagccaccgggcgcgggtctggggcatctgcctttctgtgtctggagtcaaagatgaaagggttacaacctcccgggagcgggagacctgctggaggtgttgggtcctgatttgttgggcgcctgggctgcggggaatggggttgtcggatcatggccaggaggtatctgtgtttctaccccgccatatgtcagagccagggtgcctgtgggtctttatcttggggcatcctttccaagccactgaagggagtaagatgagggagggtggggtcaggacgggtgggtcgcccaggctaggggtggagcaaaatctggaaccacccccctctgtgcctacctggggaattggagcggggtcgctggggaataggtctctgggagggaaccagcagctcaggccgagcctggaaacagtcaacatgttcagtggggtgggggctccagagcagactcaggggtctccaagaccctgcataaggcagaagtagggagaggaagagctgctcactctcactctccccacccccgacgccctggccctggctccctcctctaactaattgcctggtggcctgcctgctgtcagccttcccttgctggacgctgggtgacaggcaaaatgaggctgtgccttctcccagatgcatttcccagtccctgcaggtctgagggtgggggctcaacggagacacaggccgcagagggttctggctcagttggtggccctccatctccttgacatcatttcccctcgcctggctggtcattaggccatacgtgctagatcctcagcatggctccagagggtcacctcctaacagttcctgaaaatgttggcttctgtcctctcccaagagaaggctggggggagtttggaggagctatggggtggcgagggatccatccttgtgaagacaccttgcttgattagaggagggcagggacactgagggacgcctcacaccaggctggcccctgacttctccatctctccacctgccctgctccccgctccccaagcataggacttcacaaagctgagctgagctgagcagatgggggaggggggagaatgaggagacacagtctctgggggccatctggagagcctgcattggtggtgggtccttggacccctgccaacctggttggagggacatgggtctgtctttccgccaagtgtgtgtctatggtcgcgggtgtgggctcttggggtgaggtcctgaccccaatcttctgtttagcacgctgatggggaggagccctgtgaataattcagaccaggggaaaatccacaagtcaaatggtgaggttctgatgtgtgtgtaggacttgtttgccctgcttggatttgtggctgtgattggctgagtctgacactaaatgccactgggagtccctgagtaccaggatgtggaggggggacacccacaggtgggtcagagagggtgtgctggtggagaaagtggaggtgcctagcagaaatttagggtagcagcacccaccagggcttaccccctaccaggtgcccaggaaccccagtgtgtttataccttcttcccggggtggctcagcctgtcttatatcctgttgtgggcaggttaaacccaatctaaggacacttggctaagaccctggttcctctcattccccaccagcaggggcatgaggcttgccccagggtgacaaccttgacctctgcctgaggctgcccagggctaaagagttggttcaaccctcaggtctggcagtgtgtatcgcagagttggtcgctatgtgaacccccacccgaaccaccatggccagagctgagtcctgtcctcggtcagtgtctaagaggagaagaaccttagattgctgaggggaggggcccaccgccatcagtggtccccagtctcaatgggagaagcacagtcctgccctcagggatgtagtccagcggccccagggaacctcttccttccccttttgtccctggtggggcataggatcctgataccccaaactctccttcctctcctggctgtaggacctctcttgtgggtgaggggtgtccccacttacagccagacaggaggtgcagggagcccttctcccatgcaagggtgggtggtggggggctacctttccaagaaagctgtgaaagaaaggggtgccccctgcttaaaatgggggtggagagaaagagcaggttgagccagggtttccggctgctgccttagcaacagcagaggagcgatggctgcccagccccacgggcctgctgtgatggtgggaacaccagccagcggggcgccaagctctcgcctctcctacgcccatgcccaaggctgggtgtcttccagccccttcatgccttcccctgggaggcacgcagggtcagggactgggatgacaaggcgacctttccaggcctgccagaagagccacacttacacctgggcctgggacacccctgatctgccgggcagggagaatcccataaccttggggcagagggatcaagggaaggtgtcaggggtggtgtacgtgaggccaaaagccatgctggcatccagtagcagtggagaggaatttgcctgatgggtgctcttggcttgtgcccagaggcctgggtgcctggccaggctgtgtggggaggtcaggatggccccatgttgggtgtgggcctggagtcctgcttgcagctggggcccttcccttctggggctggcagtaaagggcaggagggactgcaactgaggcactgccccctggccactcccacctccgggacagggcagatgaagtgtggggacctggagccatggggtcgctcaggccttatgcctgccatttgcaggacagaggatctccggggggatgtggccatgtggtctgatgttgggctgggcagaggggaggggtgacattcccagcaggcagggctggcacatactaaccctggaaagccacggatgtggtgggcatgattcacagtgacatctggggctgactggcagagagctgggtgagacgggtagaagcaggtgctctcagggctacctctgcctttttcctgggaacatggagccctggaaggtggcttggggggcctttgaggggacaggggttacttatgggaaaggcagggacgtttcctgagctttggggtcatgatgtttgggggttgagattcatttttgtcactacctgcatggccctggacaagttacttaacttctctgagctgtagtttccctcacctgtaaaaagagaataataatggcatctgctggcctcctaggattgtcgagagggtgaaatagaggacttcgcacagtgcctgacacagagcagatgctcagtaacccccctccactgtgagaaaggggataaagctggagctgatctggtcctctccatctcagggcccatttagcggagggagcccagaccctgcctgtcccctccctccacctccactaccaagagcacccaaggttactgtgcactccccaggagccccagatccttagctagtgagggccaggcaacctccccaccgttatgcaggtcaccagcagtggggcccagaccgaaaactgcctggtggccggaaaccgctggagggagggcctacctctcctggagggtggggcagcgatggtgctaacggtagcagtgtgcacatgggagggggaggggaggcctccacttccccctgagagagggtgtgctggtgggggggttccccagtgagtaagagctctgtgtgggcaacaacaggaagcgtggggcgctgggtggcaggaagtggagctggctgttcctggttcctcagatgggggatctgggccaggctgtctgcagaagacccctgggggccaggacccacatttcccattccccggctgctccttctttggaggaagccgggtcttccttgctagcttgccaccgaggccaccctgggcaagcaccttaacctccttgagtctcagtttcccatttgtgaaatagggattataacagtatctattttgtaggcttgttgaggtttaaatgagttttgatgtaaagtgcttagaacggcacctagcacccagtgtttgggattgagagattaattctgagtgaaaaaaagtgtctggggagcgtttgttattgttactgttgtcggtgttgttttcctcctaccagcctggatgatataggtagtggcttccaccctgcttgcccttgtcccagctgtggggacccttgaactctgatgggagaagctgttagctctttgggtcctcagcacctgatcctggggctgggtctcctcatagatctcctgtaagcctggaattgcttataagagccccagaaaatctatatgccaaagtttaaaaaaggaggtaaaattgattgtgtttggatatgtgccgagaacactacaactaaggttgagaccatatagaggtgggcaggtggcagggagatggatgggggagtgggggctgggggacaggctcagcttctgggcccatcgggctgaggaaagcctgtggggctggcctgagactgggattgatgtccaagttcaggggtaccctggggcttgaagggctaggccatagggagagatgggcaggtggactgagacgtaggctccgctcaaactgaaagtgaaaccctagggtgtggctgtgtccagatgtggacgcagccccttcagcctcctgggacactgtctcagaagtaagcactggtgtgggggaggtgggggaagggctcttagcagtgtcttttgggggctggtcttaggtgagcagatgctgggggtcccctctcacactcagggcagggagggaggagaatggtccccacacattctaatagaaagatgtggggaatcagttccttttctcggccacaccctaaaagatgaatcctgtctctttcctcatctggcccaaagcactaaaggcagcagggaaagtaggctgaggctagttaaggtttggccaaagccttggagacaagtctgtgtttctggatgttttcacaaacttctgctcaccctaccatcccctaccctggggtcttccatggacccctgcccctccacctcttctgcctctgtgaagtgcttcttcatagtgttaggccactgaagagctttgttaaatccaaactcagcttctcactgagtgttccaggagctccgtgagtgtgaggctccggtgagggagtgcgcccattttatggaggaggaagctgaggtccaagggggcaaagaagctgtagggctagttgggcccagagcctgggtcttttgaagccagctccaggtcctccatgtggcagctcatagctgtccctccctgcccccctcaggaggcaggtatcccgcccacctggactgccagcccctcccctcctacttgagcactgtcagccaactctccgtgtgtcccccagccccccatcccatggtgctgctgcctcgctgaaggccctggtctgggggtctgttcctgttttcagggtggcctcactccaccccgagtgagtggcatctgatggcccctctcctactccctggagtgcctggctcctcggtgggcacagccacagctgaggagcagctgctaattagtgttcggcgctgtcagagctatttctgatttctgagcctaaatttagcctgtctggcaggctggcatgtgggcctgggggcctgagaaggcccaggtggggaaggggcatgggcaccctgccctccaccactgttcagacaggtgctccaggccccagcagaggcctcccctcggcagtaacaaccagggggctgtcctgggggagtggacccaggtggtggctcagagtcagctccaggctcaaagccagcccagctctcctcttactggcttcgtaaccttgggcaggtcactaaactaatctgtgcctgcacctgtgaggtgggaatgttaacggtgccagtgacggcagtgagggtggaaggcagtcgtcggcgcgcagggctcggagcagtgccttgcacagtaggcattctggtggagctggccacctgactgttggagatgtcattatgactagttactgcccctagaaatgccgctggggccattccagaaccataaagttccctgggtgggtgagggcctgggaggattcatgtcgggaagcagctgtcccctctgtggctctgtgctgggctcagccatccccttactccctggccaccgtcttttgtgccggccacggctccagtttccctggcactgctggccctgtctctcctctttgtcccttttctccaccttgctcccaccttagccctgccccaccctttgtctctgtggggtgggggtgactgagagacatcatcgagagagacagacagatggacagggacagagagacagagaatgacctcgcctcctttgtactcctgggcggttcccccaccccctgcccctgtggtagcaggagctgtcctggcccttggagggctgggggagggcggctgatgagacagcggtggtttcctcaatccaggctcactttcgcaataggggagaggaatgacgtattccacccccttcagccgctgggggcggggggcctggcggaggggcagtttcacctctccagcagggcctggccggaaagcttaggcaatggaggctgagcgcacccagcttcctgttgtctgggcctgacccaaggcagtgattttgggggtaaggtctggctggagccccagaactaggcccagcaccctggaggggaagctggctggggagtctcaggtgggtgtggccctctgactgctccagctgtggcgtctctgcagagccacatgactgagggtgtggagcgtgaaccaccatggctggtgagcccctcagggtctcccacatccccgatggagactcttactcaactcagatctccttgagggcaggaactgtctttttgggccagacatatagaaggctctcaataacctggggtttactaaattgaagggaactggcctcatcttttgggtctgtcagggagacaagccaagtctgggggtccagaaagcccctggtgctattgacacctggttgattcggcagccctgggctggcgctaacctgctccgtggtggcaggggcaccgtacccttgtcatctgtggccaggggaggaggacccaggcagagctctgttgacctttctcagctcctgggggagtcccagctgggcggcccccaccacagacccagggcactggctcttctccccagtgctgtggccgagtgaccttccccgcaaatctccccgcccctgcagctgtgatctggaactccctgcctgctgacatggccgccctcagctcccccagccctctccttcctttctcagccttctcctccaagtgggagggggctggagagggatgaggagaaggctgctgtccactctccttgcaagagatttcctggtgttcgtgaggcactggtgccctgggcctggtctgtgtacacgtgggatctggtggcacgtggaggtgggacactggccactggccactggccacactttggcctgactggtgatggctcccctgttagcttcccaccagaatgggggaagagatgatgccccaacaggaaaactggggcccagaagtgtctcaggtccccagagaggtaggctgacaacccacgctcctgcctgcacaccaggcaggccagggaggcggtgtggggggtgacacagcgcaggcagactcggattcaaatcctgctctcccttctagctggtgtgccccgggaaaggtgctctgtctctcttggccttggtcttctcattggataacactacgtatctcctagggtcagaggattcatgggggtgatgcacctcctagggagccaagtgggtttcccccaaatgcccattctcccctctccccttgttggggccccaggctcaggggtctttgtcctccctgtccccagaactgcatgaacttgcccccagacaaggtccagctgctgagccagtatgacaacgagaagaagtgggagctcatctgtgatcaggtaggtgccagcactgcccagccaccccttccctcccactgtcagtaccccaccctgaccaggctggggctatggggagaggggcaccgccatactgcccatggagccaagactctgctcagtggccaatgtagcacctggggagggtgctggggtctgcaggactcccaaatccctttctcttgaactccccaaaagaccttgtgagtcactagcagggctgggtcagcttcagaggagctggcagagctggttcaggctggggcagctggggcctcgcactgtcactgtcctcctgctgagcttcctgagaaacctctctggactggggaagggagagggcgaccctggggttggacatcttcacctgaccccatgggagggagggaggaaggggcgggaattcctgcccttttgccttgggtccagaggagctgcagttgaccagcaactccccaaggccagccactttggacccctgctttggtgctccgtccaggtgcctggactcacgggtcactcagctgtccccacccctccagcttcaagggctgcggtcggccatgggccgaccctctcccagcgctgggctgggtggggctcggctgccgcagggattctgtgaaggagggaggctgcagaggctgggggtggggagttgggagctgagagcctcccctgggagccaaggctgggcctttgcctcctgctaatgaagcagatggcctgagccggctgggcagcagtccaggggtaagggctgggaagtgggaagagggtggagagctgcccctggagtctctggtaggggtccccttggagcagctcagcctgacatctcagaggttgggggctcaaagggctggaagaagtgaaagtctgaggggtggctcggcgaatctgaggggtttgggttggaagggtgggggcccctctggggaggggtctttgccgtggtccctgcctctttgtgtgagtggccgctggagcctgcagtggggtggggggattaggaattgcatcactgagcacaggagaggagcacgcaggttcctgccaacgcagatgtgcagggcggctgggtccgagtcctacccaggtgctgggtccccttcacgaggcacctccagccgtccttccccgccgtatgccagctctggtccagggagggcaccacctgctggctagactgagttccttcccaccccagggcggggcctacggcaggactgacccctgcatagtccaccccaaagctgtgtcagggctgtggcctgggagcccatacaggaagggcaggctaggcctaggccaggggtttttaaagtggcccgatgctagctgggcgtggtggtgcacacccgtagtcccagctacctgggaggctgaggtaggaggatcgcttgagcccgggagtaggaggctccagtgaactatgttcgtgccacagcactccagcctgggccacagggcaagaaaagagaaagataaaagaaaagaaaaaaaaagaaagtggcttggtggactgtttgggtttatacctttggtatttcagaggcgtcttaagaaagcctgggacctcagatcggagctgagaatgggacactgggacgagaactggtcatttgccctggggtagctctggctggttttctgtacaccccattccatctccccaggagcggtttcaagtcaagaatccccccgcagcctacatccagaagctgaagagctatgtggatactggtggggtcagccgaaaggtagcagctgattggatgtccaacctgggggtacatgtctcccctctttactctgtccctttcccccacattttccaagctctgggcagctggagtaactgtgtgtacagacttttctatgtgcgtgtgtgggtgcatgtatgagtgtgtgtgtgtgtttgtgtgtctgtgtatttataggggaatgagagtgccctgggtgtgcactttagatattcctctgtacatcctgtgtgtgcttacatggacacattctgtgtacttatactgtgtgtatacacatgtgcagcccatatgtccatacataggtgtgtgtgtatactatgtgtgtactttgtccacttatggatgtgtgtgtgtaccattgagtccatatctaggagagagagagaatgtgtgtgtgtgtgtgtccatgtatggatgtgtggatattctatgtctgtatttagagtgcaggtatatggatgttcatgtgctgtgtgtgtgtgtgcgcacacacactctgcctctttgtgtgtgtgcatgtgtataccttgtgtgcccatgtatcgggggtgtgtgtaccctgcttgtctatgtatgggggagcacatgtagcctgtgagttcttattctgctgggcaggtgtgtggaggtggtgggggaggctgagcatgaaaggccacttgtgccagttggaggagggtgggcgctgctgcctgctgcctcaggacttggtgggcctgtgggaggccgggctccacccaccagccttccctgttctcggtccccagtttaagaggcgagttcaggagtccacgcaggtgctacgggagctggagacctccctgaggaccaaccacattgggtgagtgagggctcagatcttcctctctgggcctaggaaggctctgcttccaggcagctcctggagcttccccttcctactccccctgccccctgcacaaggctgtgcttgtggaccacctcctggaggtgtccaggacagcttcccctccccttcctgcccatgctctgactggcaccttgaggcatggctgggctgtgggacccacctgagtctcccagaatcctttggtatcattgggtctttgggggttgaaagggcaccccaggggtccttgctgtccctgttctgtgcccatgtggggcaggacctcctttctggctggagctcagggagccctgtgcccacaggtgggtgcaggagttcctcaatgaagagaaccgtggcctggatgtgctgctcgagtacctggcctttgcccagtgctctgtcacgtaagccccctgctcccagccctcatgccgctcctcagagctttgatccccgtctccctgcatctcacccactcccctggccagtttcaagccaggcagcccgagcctaccctggaaccctccacttggccttgagcgatgctccttccagaaggcctgcccccgacagggaggggtggcctctcttccaccactatgttcagcacagtgccaagaacacagcctcctcctcctgctccttagtctcacctgcaggtctgtctctccttgcgtttcctctgccccctcttaagtggcccctgcagtgttggcctccagccccattgcatcctgtccccaggtatgacatggagagcacagacaacggggcttccaactcagagaaaaacaagcccctggagcagtctgtggaagacctcagcaagggtccaccctcctccgtgcccaaaagccgccacctgaccatcaagtatgtgggccacaaagtggggtggtgggagaacagagaattcagcccccacactgctgcatctagccagcccaccccgggcccttggggttggcgagaggggtagccatgcattaggggtccgagtaagggactcatacagagtttgggacaccagtatgttaagaagccatcaggggtggggctgggtgctgtggctcatgcctgtaatcccagcactttgggagactgaggtgggcagatcatttgaggacatgagtttgagaccagcctggctaacatggtgaaaccccatctctactaaaatacaaaaattagccgggtgtggtggtgcacgcctgtaatcctagctactcaggaagctgaggtgggagaatcgctggagcccaggggatggaggttgcagtgagctgagatcgcaccactgcactgcagcctgggtgacagagtgagaccctgtctcaaaaaaaaaaaaaaaaaaaaaaaagaaaagaaaagaaaaaagaagccatcggggtgggcacctagaagttggagtctggatgggtctgggataagaagggagtttctgggttggtgggacccctcttgtatgcatctaatcccctgttttctcccatgcggcctccaggtgtcccccttctccccggtacgtagccatctaggggcaggtgcatgcctggctgactccctcccagggtggtggtgggttaggatgaggtattcaactgatgtccctgggttcagtgctgtggctgggttcctccatcctaacacgggcatcttgctgggaggcaggaagcaggcagtagatggaccctagagcatcttgtgaatccctagcttcctgctttgggtctagaggattgattgcatattaagcctcaaactttcacaatatgttatttgtccattcatgcaattatgcattcagcaaacatttttttaacacttagtatgtattaggtatatggcaggtgcccaggagacaggtcaccctgccctcaggggcccacagtctaagtgggggacaatttagtgtgacaggctgtcatggaagtgtgcctgggagctctgagaagggaggtggccaccacttgggacatcaggaaggcttcccagaaaaggtgacgctggaactgtgtcttacagacagatacaggctttacaggcagccatgggaacagggaagagcattccaggcagaaggaacagcatgaacaaaaactctgacatattagcacaatgacaagaaagggtgatgtggcaggagggggtgaaggcggggcctcctggtattactgggaatgtgatagaatcatcagagagactgacatgtggaagtcccggtcggcagttctgcaacaatgaaaacatcacacatttgttggcgaagaataagggagtacagtcatatagcacttactatgtgccaggcactgttctaagcctattccatagtcccaacaaccctgacaggaagctactattattagcattcctattctagaagcgaggaaagtgagggatagggagattaagtgacttatccagtaaatggtgagctgggatgcgcctgaaccctggcagtgtgaattcagatctgcgtcttacattggaagatgagcccaagtggccatgagcgccaccttgtggtgatccttcccatgtctcttccttctatagaccctcaccctaccaagtccctgggaagtgtctttgcttctgtgtcccccctcctccaagcatgccagaccccaggtctaaggactgaggaagcctgcctgccctcagccagcctctttggttgggtagatgggatgtggtgccgtcaggttccagatgtgcctcctcttaccccagaggctgagtggtggggaaacaggaagctggggctcactctgactcctgctgcctcctccacaccccgcccaggctgaccccagcccacagcaggaaggccctgcggaattcccgcatcgtcagccagaaggacgacgtccacgtctgtattatgtgcctacgcgccatcatgaactaccaggtcagccgaggggcatgggactggcgactagggagcccagcctgtcctcactgggggctacacaagctgccgaggctctgggatccactgtccctttaccctgtgctgtgctggggaacttgcgcatctgggctgttggctcaggcttttaaggctgatgagtcttgaggggaagcccatgtttttgctgcctctgtcaggttctctgagtacccctgcccatggctgggcatgaaggagcctcacatagggactgggctcacctaccaagaagggctggccggagggccaggggagaacagcctcgggtcgattcatttggagggctgatgggtgaagctgggtcctcctttacttagcccgcctttaagccagcttcacggtttccaaggtgcctgatgctggcttttggaaacacaaaggtttttaaaaagaggccaggtgcagtggctcatgcctataatcccagcactttgggaggccgaagcgggaggattgcttgaacccagaatttgagatcagcctgggcaacatactgaaaccccatctctatgaaaataaaaaaataaaaaataaataaagagaggccaggcgtggtggctcatatctgtaatcccagcactttgggaggccaaggtgggcagatcacctgaggtcaggagtttgagaccagcctggccaatatggcgaaaccccgtctctactgaaaaaaatacaaaaaaaatcagttgagtgtggtggcaggtgcctgtaatcccagctacatgggaagctgagtcaggagaatcacttgaacccgggaggcagagactgcggtgagctgagatggcgccactgcgctccagcctgggtgacagagggaaactccatcttgaaaaaaaaaatagaaacaaggccaggttttggtggccacagaagttgcggttggatacaaagaacttcctaaactcgagggcagttaaagatccacgtggcgtgggtgcctgaagtcctggggggcccttcctggagacactgacctctcctctctccccagtctggcttcagccttgtcatgaaccacccagcctgtgtcaatgagattgctctgagcctcaacaacaagaaccccaggtgaggtccaggccccaaacctttctccgtatctagagtcttctcctacttagccccttgcttactctgtcctccaggtctcagaggctcattctgcacccactatgctcctcctagccaggcctgtgcccacccttgccgcgggtcctgcctgttctcaagggacaacctgccccttctctctccagaaccaaggctctggtgctggagctgctggcggccgtgtgcttggtgcggggaggacatgacatcatccttgcagcctttgacaacttcaaggaggtaccggagtccctcacccaaacatgcatttccccctatggtgttgcttggagtcttgttgttggcagttgtggcctttgctggaggcagctggggacattgggtgggcatttggggaacgcccaaaagttgaagttgagccacatcactggctcagcaatctgggatggggaagttctgaatggaaggtacagggtcaggtaagggcaccacctgggtgggggtagggacaactacagggacctgctgaacctctgactcagccttgccagatccaaactagccttggttcatacctccaggagttgcggactctggctaacaggcttgcaagaagtagatgtgtggggctgcataagatgcataagacaagatatcttcattcattcattcctttaatgaatatttattgagtgcctactatgtgtcaggaacagggcacttgggcacatcagtgaacaaaggaaaccatatagggaaagacagaaacgatataataaacaagcaaattacatagtatgttaggaaatgataaatgctgtgagaaaaaagccagcaatgttgcagagggagggggaattggttgcagggtggtcagggaaggcctcactgagcaagtgagatttcagcaaagctgtgaaggaagcaagggacttggtgtgggagtgagggcactccagggagttggaacagtaagtgcaaaggccctggggtgggaatgtgccaggatgccagtgtggccagagtggaaaaagtgagggagagtgggagattgagagggagtggaggttttgagcagaagagtgacgtggctcaacttagaattaactggagaggagcctgttgaagcacaggtgtggcagccagaaggtagcttaggacgtgtgtcactgggcctcagtgagagccattccccttacccaggtgtgtggggagcagcaccgctttgaaaagctgatggaatatttccggaatgaggacagcaacatcgacttcatggtgagctcaggagcccagcagcctgaggcctgggccaggccctcttgggtgcagggagcagctagggtcctgggtgctgggcaatgggctctgcccccgcaaagcgtaaggactgagtggtcagtaggggaagggtggatgttggcagggggctggattgagggaacatggaggtgaaatgttgggcaggccaaggctgggagttagtggagtgagaactgtggagaaggagggaggcttggggtaagtggaggtggaaggcattgagcaaccccacctagaggatcatagatctccccatgtccctggctcccaggtggcctgcatgcagttcatcaacattgtggtacattcggtggagaacatgaacttccgtgtcttcctgcaatatgagttcacccacttgggcctggacctgtacttggaggtaagccctgtactgccccccagactgaactgcctgcccacggcagagtatggctgagtggttagcagcatgagtgctggggtcaggtagacctgggtttaaatcctggctctgccgttgcctgccgtgtgaccttggataggcctcttcctctctctcagtgtcagttttgccatctgtgaaataggagaatcatagaagataatcttgactctaaatgcatagaccagtgcctggcacataccaggcccccagtctatggaactgtttttgcaggcaccagaacaggtcaaggtagcccagagtctggctctgggagcaccagcctcagacaggtgctctgactccagcatataatggggaacccagagatacagggtagaagcaggagttggctcatgctggatgggcccaggacatggaggagttccctgccctggggaaggtgggcagagctgcttggtgcttcctggcccaggctgagcagagaagctgcagctccttctctgcttcctttgggaggtttcctggaggagcggggctttcggggttggatttttgaaagccaggattaacaaaaggtagagagcaggctggcgggggggtctatctgtgcaatggagtattattcagccacaagaaggaatgaagtattgacacatggtacaacatgggtgagccttgaaaacatgctaagtgaaagaagccagacacaaaaggtcacgtactctatgattgctttttttttgagatggagtcttgctctgttgcccaggctagagtgcagtgacacgatcttggctcactgcaacctctgcctcccgggttcaagtgattttccagcctccccagtagttgggattataggtgcccaccaccacactcggttaatttttgtatttttggtagagacgggggtttcaccacgttggccaggttggtcttgaactcctgaccttaggtgatccgtctgcctcagcctcccacagtgctgggattacaggcatgagccacctcgcccagctatctatgattgctttatatgaaatgtccagaatgggtaaatccataaagatggaaagtagattagtggttgccagggactgggggaggagagaatggcaagtgactgctgacgcctgtggggtttctttttgggctgatgacaatgttctggaattagataatggtgatggttgcacaaccttgtggctatactaagaatgactgaattgtacactttaaaatggattttatgatttgtgaattatatattaaaaaataaagaaaaagtaggctagggctcaggccccttcctctggatggcagtggtggcaggggggtggtttggaaagactcccccccacacacacaccaggcctcaccccactccttccatctgggggacagaggcttcggctcaccgagagtgacaagctgcaggtgcagatccaggcgtacctggacaatatttttgatgtgggggcgctgctggaggacacagagaccaagaacgctgtgctggagcacatggaggaactgcaggagcaagtggcgctggtgagagtgggtcctgaccccagcccagcacatcataggcccacagggcacacgggccacagggccacgcaagcatgggcactgggcagcagacagtgttataattgtgcattggaggtgctgcctgcctggccccagagcctggcctgaatccaaagcctgaatctgttgggtgtctttctcaatgagtgtgggtgagcaccctcactgacaggcccctcctctacccaggctcagaccccaggtgaactgaaatgggtgcctggggcccctcccagctcagtctcctcctctccctccacctcccgcatcactggtaccttggtttcctctccttatttgcttgggttcgagtgccaggctcggcccacccttggcacctgggctgagcggatctgggagcctcccccagtcttccaggcaggcatgcctgatgccgccccctcaccggcggtgccagtgccgggctgcgggtcggggctcaccatgtgctggtgctacagctgacagagcggcttcgggacgcggagaacgaatccatggccaagattgcagaactggaaaaacagctaagccaggcgcgcaaggagttggagaccctgcgggtgaggctggggcgggtggtaggccaggcgcccaagaacaggccagctgaggcttctaggcttgacatctccctccaccccgggaagaagatggaggcttggtgccaaggagcctgctggtgggcactgacccctcccgtggggttcgtaggagcgcttcagcgaatcgaccgccatggggccctccaggcgtcccccagagcctgagaaagcgcctcccgctgccccgacgcggccctcggccctggagctgaaggtggaggagctggaggagaaggggttaatccgtattctgcgggggccgggggatgctgtctccatcgagatcctccccgtcgctgtggcaactccgagcggcggtgatgctccgactccgggggtgccgaccggctcccccagcccaggtgcgcaggagcttcaggctggcggggatgcggggcagggtctggaggggagcccaggggcatctgtggcgggcagagttgggcgagggaggtttggattgtaggctcggctcaggtaggagcgcatgcgtagagcggagaggcggagaggggcccacccaagtcaaggagctgactcgcgcctcccccacgccgcgccctcgctggctcagatctcgcacctgcagcagagccggctcccggagcagcgccaccgccgccgcccccactgcccggcctcccctccccgcaggaagccccgccctctgcgcccccacaggccccgcctctccctggcagcccggagcccccgcctgcgccgccgctgcccggagacctgccgcccccacccccgccaccgccaccacctccgggcactgacgggccggtgcctccgccgccgccgccgccgccgccgcctcccggaggtcctcctgatgccctaggaagacgcgactcagaattgggcccaggtgagtggagtggaccaccttgggcccggggctggggggagatggagggaggggcctgggcctcagtgtcctccagggtcctctgcctgggggcctcctgctgcctcctggctgccccatcagccctccctgggcccaggttccctccagtagtacccccagtgctcaccactgcccccaaacccccgtcccaggagtgaaggccaagaagcccatccagactaagttccgaatgccactcttgaactgggtggcactgaaacccagccagatcaccggcactgtcttcacagagctcaatgatgagaaggtgctgcaggtgagtggccctgcctggctccccatgtgggcaccggaggaagaggggagttgcctggatcaggctgggccctgggggtagtcattttctccaagccatttcacagatgaggagggggaggcccagggatgggcattaagccagactggaccaatacctctaacaggcagaatcctgctttcccaaacgccttcccctccatccctgcagaggggtgcctcccctcaccccacttcttctgcctccaggcctctttccttccactttcccacaggcagccaaggcttcagccctcctgattccacttccagttttccaaaaggatgtattctcttgcctctaggccattgttccattctgtttcctctgcctggaatgtcttttcctttctcctttttaccgctggccagttcagctcttcctttagctcttgtggccccaagtctggatcccccgggttaggcggccctcctcctccaggctccctgtgcttcccctgtgcctcccatcagggcctgtggtcaggctgggttactggttctctgctggtggcctggtcagggccagatggatggctctagcactgtgctcagccaggagagtgccagaccccagccccacccagctccgcctcctcaccctgtaccttcaggagctagacatgagtgattttgaggaacagttcaagaccaagtcccaaggccccagcctggacctcagcgctctcaagagtaaggcagcccagaaggcccccagcaaggcgacactcattgaggccaaccgggccaagaacttggccatcaccctgcggaagggcaacctgggggccgagcgcatctgccaagccattgaggcgtgagtgtccctgtcctgggtttgtgggcagtccggcccctttgctaggctggggttgtcaggcagatcctagtaaaagagcctcaatggtgagctctttcatcaggcttcataccaaccctggtccaggaaacttgtccccattttaaggtggagaaaactcagtccatgcctaaattaggatgtcccacttcctccctgcctctttgcctagctgtgagcacccaggctgtgggatttacagccgggcgtccgccgctgacgtacgatggggaccctggctgcccagttcccagtttctctggattcccagttcccagtttctctggattcctacctcttgctctctgaagctgttggcaaatagaaaatactgaaattcatttattcaatcaaggcaggggtagccctgctcccagggactggtgggtatggatgatgcccaatctcccctctcctccctctcacaggtacgacctgcaggctctgggcctggacttcctggagctgctgatgcgcttcctgcccacagagtatgagcgcagcctcatcacccgctttgagcgggagcagcggccaatggaggagctgtcagaggaggaccgcttcatgctatgcttcagccgcatcccgcgcctgccggagcgcatgaccacactcaccttcctgggcaacttcccggacacagcccagctgctcatgccggtgtgggcggagcgggcagggcggtgtgacttgggaggggatgggcaggaggcaactcccagcctgggctgcggcagggaacctgggagtacttgagcctccagatggaggaggctccaacttatcttacctcccccatcccacccccagcaactgaatgccatcattgcagcctcaatgtccatcaagtcctctgacaaactccgccagatcctggaggtgaggggccaggaggtggggcccacccttgcctgttctggatagtgtgagagggagacccaggccctgctcacctgcaatgcaacaaagataacattcccacttctcatgtacatgctgagaaggacaaatctaagggtggtggcgagtgggaaggggtacagcagccgtgtctgtagcagctcacctgggaccctgccggagggctcagtcccctttagcgttgctctgtgagcaacctcacctgctcagtggagggcccgggaaccagtagaaatggctggtggacaggcagtgaccacacagactaggaggggatgctggcaacaagttgtgggttggactagcagaggacaaaatttggtgtgcccatggtgttaaccgtgcacatgtgtgagacctgtgtgtacacacatgtacatgtgctgtggatctgaggggcctgtgcaggagtacagtaggggctgagtgtgtggggcctgctccttgccacctcttctcctccttgtgcaatatgcttaagcggtgtcctcagctctggcattctgctgagcctttctcctgcctctcccagattgtcctggcctttggcaactacatgaacagtagcaagcgtggggcagcctatggcttccggctccagagcctggatgcggtgaggaggggcccctggcttggggactggggctggggactggctggtggcctgtggcttacaatgggtccttgtgcagctgttggagatgaagtcgactgatcgcaagcagacgctgctgcactacctggtgaaggtcattgctgagaagtacccgcaactcacaggcttccacagcgacctgcacttcctggacaaggcgggctcaggtaggagacacacagatccttgggtgtggggaggggccgtgggctggggtaggttgggagaaagctagggggccacagtatataattggtgggagggctgcctctccgattcactgacctgatactgccccatccctggcccagtgtccctggacagtgtcctggcggacgtgcgctccctgcagcgaggcctagagttgacacagagagagtttgtgcggcaggatgactgcatggtgctcaaggagttcctgagggccaactcgcccaccatggacaagctgctggcagacagcaagacggctcaggtgcgccagggctggcctcacctggaggtggggcatgtaggagcactagatagcacagcctggaggggtgtggccgtagctgggaccccttggggggatgcagcaggaatgaggggccaccctgcctgggaggagctcagatcaggtggccagtgtcctgaggggtacaggctgtgagaggtctaagctggggggctgacaggctgtgcccacaggaggcctttgagtctgtggtggagtacttcggagagaaccccaagaccacatccccaggcctgttcttctccctctttagccgcttcattaaggcctacaaggtattcgggtctggggcaggctgggagccctgtagggcactgaagcctttctactgggcagcggaggggtggggctgcttctgtttagggggtgggtagggcagtagggagggccaccctcatggagactgccttggcccacagaaagctgagcaggaggtggaacagtggaaaaaagaagccgctgcccaggaggcaggcgctgataccccgggcaaaggggagcccccagcacccaaggtaggcaactgctcctgggcttggtactgggctgcagggatgcatggcatctcatcaccctctggtgccacccccacaccctcactgttacagactgaccctgccccaggagcctgggatgggaaagggttctttctgctcaagccagctgtccttgctgtgggggaccaggcagatattccagggttttggtgatggggaggcatcctggagctggagctataaattccccctagtcaccgccaaaggcccggcggccacagatggacctcatctctgagctgaaacggaggcagcagaaggagccactcatttatgagagcgaccgtgatggggccattgaagacatcatcacaggtaagggcttggccaggccttggtcttatcctcagtctgtccttctatgctttcttctgacccaatgcgctatcctctgggggactggctgccacactgcttcttgctaccttttctgtttttctttcctttttcctttctctactccccttcacctgccccacccccactcagtgatcaagacggtgcccttcacggcccgcaccggcaagcggacatcccggctcctctgtgaggccagcctgggagaagagatgcccctctagcccctcaggtacccagatgacctggcctctgataccacgctgcccacagcccctgggacccttgggagaactgaggcatgctgccttctcctgggccagtggatggctgggatgtgatttgtggggtggaggggtctggcaaacataaacggtacccctgccatgtgcacacaatctgagtccttaggaggctaagctttgtgccctggagccatgctcccagctctgggcggactcctgaatggtaaatgtgtctccttcggctgccagatctgcggaaccagccctacatccgcgcagacacaggccgccgcagtgcccgtcggcgtcccccgggccccccactgcaggtcacctccgacctctcgctgtagccgctatttctgcaggtggattctgcaggggtgtggggccgtggacaggctgaggctcaaggaaggtggtcctcagctcggctggccgggcagcccctcctccgctgtggcccgcctcaaacgggctggtgcatcctcctcttggccacagagggcagcatcgcccgccccttcccccaaatgctgcttgcagcacccaccctaaagccccctccaaatagccatacttagcctcagcaggagcctggcctgtaacttataaagtgcacctcgcccccgcaagccccagccccgaggaccgtccatggaccttatttttatatgagattaataaagatgtttgcaaaagatccgcgtcggctccatgcctgccgcagccacccgcagcctgtttccgctcagcaaacgctttacttgcacaagctcttcatagcaggcctctgcaaaccagcgggcgccggggagaagggctgcttcttcactagagttggcggcgagggagcccgcttcgagggggcggaggctttcgtggctggcccagtatccctgcgggaggccggagggggcgagcgggcagctggggttagacacgccgggccagccccgcagcagttctccttccggctgccccgccccatttgcgccagtcctgcctcccacccgggcatctggccccttttcctttcgccctacccagtacttagtgacgccataagtgacctcgccttacatctccgcgcgtgccgcctccgtcaccgcctgccgggtccccatttcttccgggcctgcccccgctcctcgcctgcccctcccctccaccagccagtgtcgccccatctgtctgtcctccgggcacttgtcccgcccctcactgcgtgtccctcccccgcccgccggctctcacctaggccgagacacgccccgggctgggcgggatcttggggcggccgggctagtagggctggatcaggcggaagccggggcccggggctgggcttcgtgtcctgcgttccgggagcgccaacccctccaggttaggaatctgagagtacgggctgcgcgcacctggggcgggtgcctgggaggaggtggaggaggagacggtcctcagaacgggtcctgggggtcggaggcgagggcgggggttgtaagtggccgggagaggtccctcccgcgggtcccggcgccccccgccccgtcggggacgcacctacttcgtgcagtttgtgcagcgagcgcgccagctcctagttggagaggtcgctgatgcgcgccgcgtggcagaaggcgagccccgcgtgggagcgccccccaacccccgcagcctgggctgagccgcagagcccgctgcttcttgaagtagtagcttggagaagagaggcggggcggccgcctcagacactcccagccctctctgtctcacaggtgcggaagccaaagcagggccggaagccgctgctttgtctttgtcctggggcgacttggggcccaggaaacagactcagaattcagggctcccgtctctagggcaggaatatcaggggtccctgcggggggcagggtttgctcctcccattgtgggcccaggagctggtatggttgtgcccacctcatcaccccccgtgccaacttggagggcacaaagccccggcccagcagcttgaacagcatttccaagaacagggtctgcagtccctgggggtacagagctggctgttcctcacccggcttgggggcaaaaaaggtgaaggagggtgaggagggggcaccccctaagccaggcccacccctcctccaccagccttgcccctcacccatgcactgagccaagcggtggttgtcatcgaagacacccaggaagtcaatgaagcttacgattccatcacctggggagagaggagagggggtgctgtgggtgcctgccccctgcagaaggcctgccttgcacatgcctgctggcagttccaggtgttagagaatctagtcctgcctctagccaagggcagaccccagtttcaatgggggagaaacggcccatgccttgggggttcccaaatcaggattaggatgaacacagcagcaacgtttacaggccatgagataggtgtgttggtcagggcaggcttcctggaagagggaactttaaaataggaccaggccaggattttgtgggaaggggaggcattctttaaaagaatgcctggaggtgggaggggacaagaagacagggttggggcacccaccatccaagtctgcctgccgcagagcctcgaacgtctcctgtggactcagctggatacccacattgcccagggcaactttcatgctgtgcatgtccacggtgcctgttgggctggagctgaagagtttgaagatatcctggaaggctgagggtagaggggacaggtggcaagacgaaccacccacacaagaaccctgagagctgcccactctaactcaggtggaactgacgacttggctcattccaactccctcctgggtgttttaaatttttatttatttatttatttatttttgagacagagtctcactctttgcccaggctggagtgcagtggcgagatctcggctcactgcagcctcaacctcccaaggctcaaacgatcctctcgcctcagccttctgagtagctgggatcacaggtacgtgccaccacgcctggcttattgtttaatttgttgtagagatggggtttcgccatgttactcaggctggtctcaaagtcctgggctcaagtaatcctcccgccttggcctcccaaactgttgggattacagacatcaacctccacacctggcctataacttttaatataaagagtagcagtggctgttgtgtgttggtacatgttatgtgcccatccagtcctcatgtccaaaactcatgtttgaaaaacattcaaaactcatgtccaaggtcacatctggcagtctggctctgaagctacagtgtcttggagccctgctggtgcctggcatgtagtaggcactgaccattgttgatgatgaataaagtgattctgctttgaggggcccttgccaatatcaggacatgttgtttgggggagcactggggctgtagtttcttttgcctttacccctatggtcctagaccccatgaggcaggggaactcagatttttccccccattttttctccttctttaccttctcccttcttttccatcctgttcatcatccatctatccatccatctaaatacctgcattcacctatctaccaatccactgagttttcttttcctttcctacacacacacacacacacacacacacacacacacacacacacacaagactgtgagccctagggttgtagagatgagcaaatcagacaagcatggagggatggttgcaaacactggcttcttgcagtgaccccagcttcagggcaggcaatcctttgtagtttttccctgagcaccccctaattttcttctctactcccagtcctggggccctcacctgccagctgctggggtgtcttgcctgtcaagctgccccaggagaaagaaagaggttggaaaggtctttgcatctgttgcatagaaatgccagggctagccaggctttaccccaaacccagcacccgaggcctggcctccggtccctgccttcacctctgagacccagcatctggacctgactcggctggatgggcagcttcacaaggccctgggtttctcttgccctcctcatggtgtgtgcagcctttgtggccatggctgctgctggctccatctgggtcagccaggcagtatgcagctgcagcctccctttctgcatcctgccagcctgctcctttgctggatctcatgtgagcagcctttgagggtgctgtggaggcctcagaggcaggaaggagagagggcagagggacccagcccactcaggtactcagactccaggggacctgggaccaggcctgtgggtatacagttccacctcctcccaggatcctccataggaagctgtaccacagccctctatgcaggggattctggggaaaggggtagggcagtgattccccccaccctgggtgagggaaaaggaccctcctccagccctggtcacctgtttgttttctgtgatgactcggatctcttggtcttctgccctctgcaaattactcctaaaactcaacagtaaggccaggcatggtgctcaggactgtaatcccggcactttggatggccgaggagggaggattgcttgagcctagaagttcaaggctgcagtgagccatgatggcaccattgtactccagcctgggtgatggagaaagaacttgtctcaaaaaaacaaaaaaataaaacccctcaacagtaagaaaatgaacagcccgatttaaaaaaaaatgggcaaagccaagtgtggtggcttacatctttaatcccagcactttgggaagctgaggtgggaggatcacttgaggccaggagtttgagatcagcctgggcaacatagaaagatcccatctctacaaaaaataaaaagcttagccaggcatggtggtgcacacctttagtcccagctttttgggaagctgagacaggaggatcacttgagcccaggagttcaaggctgcaattagccatgatcgagccactgcactctgcctgggtgatagaatgaagccttgtctaaaaaaaaaaaaaaaaaaaaaaaatctaatctaaacaagcacctcaccaaagaatatatacaaatgaaagtaagcatatgaaaaaatgttcaacatcatatcttatcagcaaattgcaaattaaaacaatgagatactattatgcagctattcagataccaaaatccaaaacactaccaccaccaccaaatgctggtgaggatgtggaacaataggaactgattaatcgctggtgggaatgcaaaatggtgcagccaatctggaagagagtttggcagtttcttacaaaactaaacgcacccttatcacatgatccagcaatcgtgctccttggtatttatccaaatgttttgaaaactcatatccacacaaaaacctgcacatggatgtttatggcagctttattcataattgccaaaacttggcggcaacccggatgtccttccgtaggtgaatggataaataaacagtgatacacccagacaatgcaatagtattcaccactaaaaataaatgcgctatcaagccaggaaaagacaggaggaaccttaaacatgtattaccaggtgaaagaagccaacccaaacaaactgcataccgtatgattccaaatcattctggaaaaagcaaaacagtggcaacagtaaaaggaccagttgttgacaggagttggaggggccaggtagagcacagaatttttagggcaatgaaacgactctgtatcatactacaatcaaaacccatagaacgggccgggtgtggtggctcgcgtctgtaatcccagcactttgggaggccaaggcgggtggatcacctagagtcaggagttcaagaccagcctggccaacatggtgaaaccccgtctctacaaaaatacaaaaattagatgggcatggtggcgggtgcctgtagtcccagctacttgggaggctgaggcaggagaattgctcgaacccaggaggtgaacagaggttgcagtgagctgagaccacgccattgcactccagcctgggtgacagggcacaactccgtctcaaaaacagcaacaaacccccatagaatgtagaacaccaatagtgaaccccattgtgaactgtggccttttggtgatgatgatgagtcagtgtaggtttatcagttgtaacaaatgtaccactgcaggatgtccatggcgggggaggttgtatgtgggtggggacaggggtacatgggaactctttgtactttccactcagttttgctgcaaacctaaaactgctctaaaaaataaagtctattaatttaaaaaaacctaaggaaagatgagtcctgagagtccagtgatgcttctggctcagtcccccaccgcccccaagacacctacctctgcagctcctccttgtccctccttccagtctccttcccgcttctcctgctggccctggcccattctgaactgctcaccccttcctaatcccaccctccaggccctgggcatctctctccttggcccgttcgaaagctgggcaggctcttgaagatccacaaggctgggcttttgcttagcagggaacctgaggccaggccatggcgcggcctcccattctccctcccccaggcttccctgtccacatccctgtccatccgcatactccgaatccccttccttcctttgctgccgtctctactctcccagaagccagtctatactgcctgccttctgggcctccaaggccaaaccctgggtgggaggagtgtgcatttgtgtgcatgtgtgttttttttttcttctttgagagtcttgctctgttgcccaggctggagtgcagtggtgcaatctcagctcactataacctctgcctcccggaccccagagatcctcctgcctcagcctccccagtagctgggactacagatgcatgtcaccacgcccaactaatttttgtatttttagtagagacggagtttcaccatgttagccagactggtctcgaactcctgacctcaagtgatctgctggcctctgcctcccaaagtgctgggattacaggcgtgagacaccacacccggctttgtgtgcatgtttggtacatgcgactgtcacaggcacatgtgtacatgggcatgtgtggcatgtgctgcttcctctgtgtgtgggtgctgtatgtgtgatgtgccgggcagctggtggtgtctgtgtgcacatgtctgggtgatctatggctctcctgcatttggaggtacgtctagctccagcctgtgaccctctggaggaccagttcttcggcctcattttcctccccttcaagctcctggacaccatcccttccccatgccagctcttccccatgaagagcgcaggaagaaccccctcagacccactttctcacctgcccagtccacgcccagaaggccatctcctcagatgatcccaacacatccctggcctcaggccaagaggaagcctcatttcacagtctaagaaatggaagcctcacaggacaccgaggtctccccaagaccagccacaagtctttctgctggcctagagggctggccaggagggagtgaagggaattgaccctggggagtgggcaggtgagagatgggtggccaggacaagggtggcattgccctctgggggcaggtggagctggggcagctaaaaaatggggtggcatccctaaaaaacagacgaggacacagcagccaggagggctccctggcccaggggcatttgcacaaaagtctaagccgacggccagcactggaggctttattggttctgtctagtcatttctctgggattgtgggggctgacagcttaaaatggattttcaccaataatggattctctttctcttttcctggcggcactgagctgcaacacaaaagagagagtgtcacttgggccccagagggtggttgaaggagaggggtgagcccagaggcccctctgaagaggtcgctgggggtaaggggtcttctgctgctgcccgcgtctgggcagctgagattacattctgtgtccattcactaccagaaagcaaggtgtactggagagccctgcaccctcattctcccctcaagaaaagtgtcctggaccccagggttggggccaacaggctttcaacagggcagaccccagcctgagcattcccaaccttggtgaggcccgacccccagggtggaaagccgcctaatgccagtgtggtccttcccattttgaacccaggcccctgtgcccaccctccttggtccccaggcctcctccagccctcgccttggctctgcgcctcagtccactggaacctcgttccaacagcctttatgaggtcactgaggtggaggcgtcacagcccaccacatcctgctcccaggccctcattccactgttccccacccctacccagctgtgtgaggacccctgccacgttctagcacagcccctctatgggagctgcggggctggcctcactcactcttccttgcttccctgcagcagaggggacgtggctggtggctggagaagctggatttgccctttgatggtggccctcttgatccccggcttgctgaagtcaaagtaagattgagcgaagttcttgtcttcctgactccaagatttcagtggtgctctggcttcgcgtggtttctctggcagggtctctgcgtgattttctggctctcgctcctccacagtggtcaggaggggctctgtggaaggctccagagcctcctggggtggagctttcatcatgtgttccaaactgggcaggtccatcctgctggaggaggccatggccagggaagatgcaaaggtgattagctctgtcaggtcaatgggtggcgggagatctgaggacaggagggggcttggtgcctgggagcttgtggttggaggagctgagtgggcatcagggatctggagctgctcctcggagcacagggcgttggtggggatggcctcccggagcggggatctgatgggctggcctgcgctgccattgttgagctgcatgttgatggcccgctgcaggctgtgctctgaggcctggatgagcttgtttgcccagaagaggtgcttggaggtctgcgcactgatggagtgatggcaggcagacacgtggttctcctccgtgaaactccggcagtttgaattcagactccacggtctgaaggtctgtggcgtgggcagccccatgttggagtggacggactctatcttgcataccagctgcatgggttcttcaaagtcagactcctcgttcgagttggcttccgtgtccagctcagcttcaagcttgagggctgggtatagctctgactccagtaaagccggcacctgtccgatctccagttctgggtctgggtctgggtctgggtccaggtccaggtccacttggagttggggcttctgctctagcatgtctgcctccagctgaaatgtttcaactcaaagctgaggaggcaggagcgggaggtcctgcccctgaggccctccctggcaccgagtccctgccccacccctgccctgggtcctgctgtcttccccccgccccctaaccccatgcctgcctcctctcagagacctgcccggtgagggggtgtgtgtgtgggtgtacccacaccggcctggtactagggtcccaggattgtcaagggtaggggctggtggggacttagggaagagccctgccgcttgcctaccacctccccgtaagaggacactcccatttttacctcctgttcctcttgtatctggtgttgacttaagtcatctctaagacagaagaagacagagtgggtgatggggatctgtggggcttcagcgggaagggggtttctggggccctcaaagccctctgccttgtaacagaagctggcacgatgcacctcccgccgaccaccccgccaccagctcatccactcccctgctgtcccactccactgccaccaggaagtctgcggttgtattctgaaactttagtgagtttaggaagctgcttgccaactcatgccccacccccaaagaggaatccagttggttggaggtaaggcccaggaatctcatttttatcaagcactgcaggtgagctggggcaactcacttcgaggattagtgcccagaacactagtccccagcaggggagccccagagcaatgtcctcccacccacctgcccactctttcttcaagtgcctgcccacccccgccttgagcagctctgtcctcagcaagccaggcagctctgaggggtcaggtcctatcctgtccctgggtgtgccccaccacccctcagtcttcctctcatgccaggggctgagggcataaacagaagtgggaggataggcgccccacgccctccccagccttttggcctggacactggccccggggaggttttggaaatggcagaagggagggagatcctaggctgggggatcctaggctgggggtgaggtcggaggtcctggagggctcgggggaggccctacgttgattgaggatggttctcaccgcatctctgcaacctccactgaccctttgccgcagcatggaaatccatgggcacctgacaggggaaaggaggtgagggcagggagctgcagggtagaggacagtcccagagggattccggagccagcccccttttcctgcccttcttttctctcttcccggctgctattccccctcaccgtcctgccccgctctccttgttcccgagccggtcgccattcctatcctccagtcctgctccctccactctccgtctgtgccttgcctcctcggaggctcccggttccatctccatcccccaaaaccgtgactgctaacagtaccctgaacatgacagagcgcttccatagcctggtcactttacctgctttatctcactgattcaacacaaaaaattaggacaggtccatttgcccaaggtcccccagctgaacatagctgaagtgatgacttgaatgcaggcttgactcaggaaactcttaactccctgcccccaccggctactcccaggaccctgtaactgcgtggagtcccaataacgccccatgtgaacctcccccatctccccattcctgctcctctgccggcttcctctcctctctctgggtcatccatcactgactccaggccaaggcctgcaccccaggtgtgtaatctgaggtggtgctagcacctatccgacgatttatgagctcagatcaccctctgcaggggagactgactccttgggaacgtccgcaaccccaaacccctccctggaggcttgtatcttttactgcagaagctgtttcttcaccctgtgggagtgggaagcaccaggctgccctgttctctgctacccagggccatgcataggggttgatggtggggccatcatgacaaccctgccatcatgcaaggtgggtccccatcagcctggggtatggcaggaagtgacagccctggctctggctgggaagaatcgctcccaggatcatattggaaggatgagaatgtactgcggtctcttcctagagatgtagtggctggagggaggggtccttgcatggctggtcttgggattgggaccatctgcttcagcctggtcttgggggatgtatcagcagagtggccggctcaatgatctcttcagaaccctccacctccttgaccactatgcttccctggcttcctcacgtgtctctcttctccctctccaactccccctgtcccaggtcctgctgttcccccaggcttctgacctcagggcctttgctccctttacagaatttccctgggcagtttaatcaacacccacagcctcaacccctccataaacggcagctgggtatggacaggagaagaaattactgttgtgtgagcctcttaacagcactgggggctgggagaaaaagtcagacattgactcagcttgggacctcgttgcctgacttgagaatgttctattagggattcaagtgatattctgcagtatatgaaataattgaaataattttttttgaggcagggtctcactctgtcacccacgctggagtgtagtggtgtgatctcggctcactgtaacctccgcctcctgagatcaagcgattctcctgactcagcctcctgagcagctgggattataggcatgcgccacgacgcccagctcactttttgtatttttagtagagatggggtttcaccattttggccaggctgatctcaaactcctggcctcaaatgatctgcctgcctcggcctcccaaagtgctgggattacaggcatgagccaccgtgcctggccgaaataatttcaatttccagtggtttgttgctagtatacagaaatatatccatcttttgtatcctgcaactatactaaaatcttatttgttctcatagctttttttttcttttagattctatcggattttctacatagacaataatgtgtgtgagtcaagacacttttacttcttccctcccaatctggttcctcttattttctttacttgcctaattgcactggggacaatctccatacaatgttgagtaggagtgcgtgtgtacatcctcgcttcgttctgagcttaggggaaagtgtttagcctttcaccattaaggatgatgctagctgtaggtttcttcatgatgcctttcattagcttgggcatctttgtgaagtttcgtctcttagattgcttagttttaattaggaatggatgctggattttgcctaatgctttttctgcatttattgagatgatcatatggtttttctttaatatgatattatatatgttatacataacatacgttataatacattaacatatgagtaatgttatattatttgagtgataattcttttatatttttatattctgtttatggtaaaatacattgttttttttgagacagggtctcactctgttgcccaggctggagttcagtggcgcaatttcagcaacctcaacctccctgtctcaagtgatccttccacctcacctctggagtagctgggactacacgtgttcaccaccacccccagctaatttttgtattttttgtagagatgggtcttgttatattgcccaggctggtcttgaactcctgggctcaagctatccacctgccgtggcctcccaaagtgctagattataggtgtgagctaccatgcccagctataaatttattttttaaaatgttaaatcagccttgcgttactgggataaacctcatttggttgtgatatattaccctttttctatgttgttgaatctgattggctttttttcagaattttcacatgcatattcatgagggatatcggtgtataattttcttttcttgtaatgtctttgttaggttttgatagggaggatggcttcggcccgggaggcagacgttgcagtgagccgagatggtgccattgcactccagcctgggtgacagagcaagactctgtctcaaaaaaaaaaaaaaaaggagatgaggtctcagtatgttgcccaggctggtctcaaactcctgagctcaagcgatcttcccatcttggcctcccagagtgttgggattacaggcgtgagccaccatgcctggcctaatttcttacctcaaattcatatcttgtatgtccagactcttaagtgtggctgccacggttctgcctgtctgacccctgtctccctttctagtctgtcatctctccataccccactctcctcgccctattcatccttcatcctttcacccaaatgagaaacctgggtcatttgtgactcctcctccctccgcagctactgccctcctacccctgatgctgtcctcatctcccagtaccagagccagcacacacccatgacttcctaccctttggcacttggtgctgagtgctttgcacattcagtcttcatacctaccctatgcccagttggccacggctctcctctcacagatgaggaaacgtgtatgaggtcatgcagctattaagagcagcacacgacccaaaggcaggtctggctggctccaaactctgggatgctactcactgcactgtcttaaatctctttagtcttccagtgggaccactgcaactatgtccccctccaacctggattttcaatgacctcagagtgagcctgctacatctcacttgtctccggttacccccagactccatgtggcctcttggtctgatctctaccttcatttttcatctcttggcatccagcttcctgtccctcaccctaagccgaagctacccccagagtaccgcaggcctttctgcacccagtgcctttgcaaatgctatttcttatacctggaaagccttcttctggcaaagtcctactcatgcctgaaagcccaattcaaataatcagtgtaatcctctccatgacagacctggctgtctaatctacgttttaccttacaggcgtgagccactgcacccgacctctggtttttttttttttttttttgacagggtcttgctctgtggcccaggctggagtggcagcatcatagctcactgcaactcctgggctccagtgagcctcccagctcagcctcccaagtagctgggactacaggctcatgccgccacacctgtctaattttaaacatttcctgtagaggacaaagtctcgctatgttgcctaggctgatcttgaactcctggcctcatgtgatcctcccacctctgcctcccgaagtgttgggattgcaggcgttgagccatcatgcccacctaatttttgaccgtttttaatgctggcccatgcccttctgggagagaggatccccaaaagaaagccaccatttcagtgggggatctgacgcccctatgggaaggggagacacagggcactgggggcaaacatctttgctcattggttcagagaagagtacaaggcatcaacgaagcgctccgtaaaaatgtgctgaagactgccgctcctccctgcaaagcctcaagcatcaaggagggacaactggatgtgattttttggatctgcagttcaggataattcatgagtcgtttcctgtgcacaaggccattgctccttctgtggtctcagaaccccttcaagaaccactgactctgcagtccctactccaaggcgcgcatgcgtgtccgtgagagcacatgggtgtgcaccgcgcaggggctgaggctgggagccgtagtcaggggcaccgggtgggctttggcggcgggtcgacctgcctttcaggtgccgggggtttgggagcaggggaacgggccctgggcggattcctgaccgcccccttcgcgcccctccccctctcactttcgctttccccgcctgccccaaccctcgcccccgggcgctcggccgctcccacctgtcacccccatgcagaccgaggctctgtcctggaggcggggagcgggctggtggatgctgcctctccgcctccagtgtgctctttggctgagggactggtgggcgctggaaatattagaggcgccggtgcctgtgatgtcgccgcctctgtgacgtccccgccgcgaccccacaggcagggagccgcatttaggtttcgggcgggcggacgggggacggcccgagtgaggcgtcctccgaaggctgcgggcccgaagccagaactccttcctctccgaagacctcgggggtggggctcgcgcttccgcagcgggcctagagcgagaggcaggcggcaggtaagcctggctgtgctggacaggacttgcacccgctctgcacgccagcggctcagggctgccgcccttttcgtggtcccagggcccttccaagaaccggctaaaccaacccaagccgcgcgcacacacacttgtgcacacagggagtgtggagccagattcgataaggcaccccgtgtgccccagctccatgaccaaggaactcagcaccccgtgtgccccagctccatgaccaaggaactcagcaccccgtgtgccccagctccatgaccaaggaactcagcccacaaaggcatccctggccccatgcagggctcaggaggcagcggaaagggttaagagtccaggcctcaaggacaggaggggagggtggagggcctgtggtgtgcatccggcatccctggatggtcagggcccagaacccatccctatttcccttctggtggtagggggctgcctaacttgggcagtggcacaaagcatgcaggctttgttgtcctcctcctccacccctcagcctggcatattttggcgagggacttccctgatgccaccgggcaaggtatcttgcctaactggtctgaatgactagcccagcgttgggactagaagcagccactgggaggagtggtgggaaagcagccccactcaagggctgaaacagtccttgtccaaaacaagggggacttgaaaagatctcagcaagaaggcaaagagaggcagctgttagggtcgtgaggttcagcaggccggcaggcaagagagaggacaccgatggcctggaaacatttgtcatcaccccaaactttattgcttacaaagagttctctacaacccagactctgcagtaccaaggctgcagttctttatgtgctgggggccggggctctctccccgggagcagtctgactcaatgtggacagctggacaaaggctgtcttggcaagatgtgggaatgagcttctcccacggagtctcggcgtcccctgccccaggaggttgaggctagcagacaccccctgacgattcacagctgatttaatgctacgtgagtcctgagtagctcccctgggagaagaggctaagctggggcaatggggaagggggtgctattcttagagaaatctggaagaggtttgaggagtcacatgcatgtggacagctcaagactgtgtcccttcaccccatctcctggcttgctatgctcctacagtgtcactgccctgccctgccctgccagagggcagccatgaaagtgctttgaggtcatcagagtgcaaagtgccgtcggcagtaccctctggccaggggcagggcagggtgagtgtcagtgtgatgctgagctgtgctctggggaaccagcacgctggacactgatagtggggctggggcgccggagcgtctctctctgctgctttccttagcactgatcatgtccatccacagactgttcctgtcaggcatatcctgcatcacccttcacctttacagatgagggaactgagtgccagcgagtctggggcagtgctgggcctgaaggggctcggggcctgctgctctggggaagagtggtagccagcagcaaaggggcacatgtctggggactgagaaccacttcacttacacaccttctttggtccttggctgaaccagaggtcaactcaggacctgtgttgcaacaacctgaaaagtgtggtgtattctaccagggagccttcccagggtcaggcattcttttcccctacacccaaaaggggtgagctggccaggtgaggccaggcaaggggtttagagggcccccttaacctacgggcgggcatacctgctgacctggttctgcactgaacctgagtttgggcccttacacacttgacactctcacagcagcctggagggtgaggggccgaggggctcgcccaccccttctgacccaggctggaagctgctctcccctgtctgccagcaaatggtcactgatccaagcgggtcaggccaactcgactggagcagggcagagaagatcctgtttgtttcccgaggtaactcctgccatcctcctctgtctcttcacgtggcggagtgttttctcagcagggtggggcagggctcaggtgtgaaatcctgggaggcattctgcttgcccccaccttgctgctgcgaggccctggtcccactgctgagccgggggctggcagatccctgggaacggctgagcctgtgtttcagggcagcatcgtgcaccgagcaggaaggctgcttccggcagtgtggagccggcggtggagggcagggttagggcctgttctccagctggccatgcttgaccctccagctccaggcgaagctgccatcaggggccagtgtgcactgcaggtcgatgcccgagtctggcacctccatgtcgtagcgaacaggctgcccgtctttggtgaccaagctgaaggctgcagctgggatctaagggtggagcaaaccagtgggctgagatcatggcatagggctcaagccatgtagaaaggtaaagacatctccttccagccagaccggcagccctaagggcactgcctgtctgtcattccacgggactcagagaatcccacccggctcaagtgtaggtctggaggacctctttgtcaccactgccagccttgctttgaggccctgggaaatgctttgaggtcctgggggacgttgaaggccaattccaagtattccctagagtgccattctacttctttgaaagctttcctcctggagggtggggccagctgcattggcttctgggactctgcccgtcagagtgtacctgccccccttacctggctgctgatgccagtggcgatgtctcccactttgacccggtggaactcccggatgtgcaggtgttcaccattaagagactgtatttggactttcacacctagaaggcggacaaggtgatagtcaggagagcggctgctggctccccaaggaccagggtcctggcaggggctgggggaacgtttttgttaaaagtcactctgccctatgtagggggagcaggtctggctgtgatggagcagcagagataaaatttaggctggtctaagcacagctgcatttttttgtttttgagacagagtctcactgtgtcgccctggctggagtgcagtggcgtgatctcagttcactgcaacctttacctcccgggttcaagtgattctcctgcctcagcctctcaagtagctgggattacaggcatgcgccactatacccagctaatttttgtatttttagtagagacggggtttcaccatgttggccaggctggtctcgaacccctgacctcatgtaatccacctgccttggcctcccaaagtgctgggattacaggtgtgggccaccacacctggtcacaaagctgcatttttataagaaaaaaaaaattcaggctggaacagccctcatattatatacacctgctagttcttcctggccgtcagcacctgggatttggcctgtgcattgctaagagctggggctggctcctatggggaagtagtatttcaacttggatgcaaagcagaaaggaactgaacacaaggattcttaaattagattatgggcaatttagattgttgcctgagttgaagtggcctttggccagccatggggccctgatgccatgagtcacacttgccctggagagggccagggaactccaagctgatgatgcccttgttgtagcaaagccacatcataacctatgcaatcaagcttgaaaacgaaggaattttatgttgtctttctcatctgacctcaaatcccagagggggattccttttgctgagtttttgattaaaatgctcatgggtcctgttccttttccctttagaagagattaattgctcattttcctgactccaggtcaagagactgctctcctccccaagctaggggaaccttctgggactccatcaactgacaatgaggggataatggtccctcactgccccatcaggaaaggctcatgggtgattgggacctttgcttgaaacccaacttactggccaggaacctcaagttctgggaccaggcgccttcctccctcccactgtgccagaggaggggagacaaaatccctcaatggctgtctagctccaggcagatcagctgccacggggactgctgagcaggtgggaattggactgtaccattgaaatagcttggggtgtcggtgggccgcccccgggccagcaccatgttccagctggagcttcgagcctcggcctggctgctccaggagtgtacgcctgagctcagggtgtcccgcgagctttgagaggcctttgatgggttctgaaacaacaggattgggtacgggctcagggccctgggctccaggatccatctccggcttgggtctcatttggggaaaaggggcactgctcatgccctcagctggaggagggtaagggttgcctccatgggggacgaaggcctgcctccccattatctctggtggcaaaacacattccctaatcccagaagggtagattcccatggtttctctgactctgaaccatgaccacctcccccaacctagtgaggacccccaccagaaggaaggggtgacccccatcaccctccctttacccactacttgcacagtgtccattcactagctggacgcaaagctacttgctctgtgccagggccgggaaaaccacacccctggagccatggctccggggccacaaccgactcaccttctcactgtcatccgacagggagaggctgtcgatgctgaggcacgagagaatttgctcctgctcctccagagaaaatggctgggacaggctgttgaggaataattctgcagggaaaagtggaagatggctgtgaaagactgggaggaggctggctgtgttttcaggggttcttcctgcacagtcggtagaagctgagctgctggggaaggggctggaagaaagcccacaccgcaggtaaagagaaacaccggcctccgcgggtggcccagggccagtgctcagggccccactgcagccacggctgcccgtacctatttccagctgctgcagttcctgctccgggacggttgctttccgctctggtgagctggggtttctggcaggggctggctccagggaggacagaggtaagggttcccacatcccagactcctccttgctcaaagtcaagggaggagacttgtttggctctgggggctctggtgggagaggaggctggagcttaggggctctgcctgttgtctcctcagctggccggggccctggggcccttggcgaaagctctctcggctgggcatggagggtctggtggtaattggcttgatttggcggtggatgtcttggttctttatattctcccctccaagggctcttcagacctcccactagaaaacagagagtacaatggtgaggggaagcgtgctgtgcacagacagcggtccaggcaggagcggcctctcctgagtgcagaagggctagaggcaaacaaaggggaggacactgccccgggccaccatgggaggtggctccagagggcagcatggtggtctccacaggagacttcctcaataaaatggtcccaatatgacagggataggactggatttctgtctttgattctgtttttcttctaggtatcagtagcaaattcaaaaactacagaatcagctccagaggactttgttaacaagaaagagaagattgaaaacagccctggggctacaccaactcaagagctcccaggcaaagtggcatcctggacccaccatctctcctaccccatcctcagtcggtacttccccaggcaccgtttgttctggcatggggctagttcagccctgggaccaccctcatccttataactaccagctgtctttggtgaggtgcaagatctctctggttttctttatttcattttcattcctataatcacagccttttttgtgcccatccctcaggtgacattctattatgtttgatgtgtcatttttgatttggttgtgtccttgcaaaatgtgcgttgttttatttatcaatttatttttatttttatttttttaaagagatgaggtctcatcatgttgcccaggctggactccaactcctgggctcaagcgatccttccacctcaatcttctgagtggctgggactacagatgtgcgccaccatacctggctattgatcaatttttagtttaccaaacaggcattatgttctgggtcccattctgtgtcgggttctcttttcactcggcaccatggctttaggatccatccatgctgctctgtgaacgccgagttgctttaactgcttggtgctccatgaggcatccccttttgtgtctctgtcctcccagtgagggaccccatcgtaccctactcccctcccacaaaggaagctgtagtgcgcgtcctcaggcgtgtccccatatggatctgctggcattcgtttgtcagtgcacccaggggtagaagtccttggtctcagtctgcagacgtctgcctgagtgcagccaggtgcccccccagagtgggtagccttgtccacatgcccatcagcagcacctgaggggtcccaacagccctacatcccaccaactttctgcttttttccagtcaaatggctcttgagtgttacctggctttatttatttatttattttttgagtcgggtctctgttgcgcaggctggagtgcagtggtgcaatcatggctcactgcagcctcgaccttccaggctcaaacaatcctctcacctcctgagtagctaggactacacgcatgtgccaccatgcctggctaatttttaaatttttttgcagagaaagggtcttgctatgttgcccaggctgatcttgaactcctggcctcaagcgatcctcctgccccagcctcccaaagtgctgggattacaggtgtgagccactgctcccggcctgtctttattttgtattcttggattcctagtgagtttgagccccctctatacatcataacccttatgatactagtaaacatatattttatctttaaccccatttctggcacagaactcctaaaagccttactctccaaaatgatctctttctgtgtactaatggattgactgaaggctggcagcccctaggtagcttcaagatgggggctggtcatcagagagacataggcaggattagagggttgggactttcatcccaccatcccacgtactgggagggaagggggctaaaggttaagcggttcgccaatggccagtgatttattcaatcatgcctacgtaatgaagcctacacaaaaacccaagaagaccgggttcagagaacttctggtagctgggcacatggaggttcctggagggtgccaagccctggaagctctgtgctccctcccacatgccttgccctatgcatctcttcatttgtatcctttgtaatatcctttctaataaactggtaaatgtaaggaagtgtttctctgagttctgtgagccactccagcaaattaatcaatcccaaggagggggtcatggggtccctgacttatagccagttggtcagaagcacaggtaaacacgtgggcctgagactggcatggctagggggtgcagtcttggggatcgagccctcctgctgtgggatctgatgctacctccaggtagatagtgttggaacagaactgaattagaggacaccaagctagtgtctgctgcagaactgattgctggcttggtggggtggaaatccccacacatgtggtcacaggagtcttctgggttgattgtagttgagtgggagaatggaaaaagcacttcgagtttgcgtgtgagttttctctttcccatctcctgagcgctgcctctgggtccaggcgtggcactgtcgcaatctcccaacaaccctgaggctgctgcacccccataatccagagggggaaactaaggctctgaggggtgccttgctctggacctgcgcccacctgcctcctctgtccacctctgtcttctgccccccgggtcagccagcgtggggctcttcctaccttgctgtagtgcccggttcaccttccctcccagctccgctgcagacacgcggtggatgggctctttcctcagcccctcttggatggcctgggctgtgagaggggcgcaggagggtgggatctccctcacaggcggaggctcgctggcaatctggggggcaaaagacaacaggtgaggcctgccttccctcatttcctgatacccggctgttattgctctttgcgcaactcccgccggcccctgttcccgctgtgctggggtctaccacaaggaatggaggggtctgggctacagtgagggcacttttcccaggaaagggacaaatggagccagtaaaacaggccagagccaggcagcaagacgcccacagcctccaggcccggcccgttaggaggcaggtggatggggcccagggtatggacagaagagagttctcacctgccatgaacttggtgagcctccgcagctggatctccccttgtacccccagatttgggtggcaagtatttgaattaggatcccacatggatgaccaggcctccccttgctccatctgccaccgcagagcagcccctccagcctgcagcctgggccccagggccctgcagctccccctgttggccatgctgggtgccgtcaccgaccttgaggcagagcggccctcggaagaactgagtccaggggtggcagccgttgagcatgtgcagcatcatacagcagctgctccagacatccaccttggcgtcgcagctcctgcccagcaccacctccggagccatgtgggtctctgtgccagggatgtagtcccctgagaagggggatgagacataaagttacctggaatgctgatgggcaggagcctaggcaatggccaccctggttaatcctcggggtatcttacatttgtcactgttaaagtactttttattttattatctttttagttctttgagatggagtcttgctctgtcacccaggctggagtacaatggcgcgatcttggctcactgcaacctccacctcccgggttcaagagattctcctgcctcagcctcccaagtagctggaattacaggcatgagccaccatgcccagctaatttttatgtttttgtagagatggggtttcacccatgttggccaggctggtctcgaactcctgacctcaggtgatccacccacctcggcctcccaaagtgctgagattacaggcatgagccactgtgcccggacatgttaaaatactttaaatatagaaataaagtctccaagtcagacttgtagggaggagctaggcggggactctgctgggaacttgtacaaagtaacagagcatccatgatgtggactctgccctttggaccaaacccttaaagtgttttttaaaaatggggcaggggctggacattacaaattaggttgtagaaggctagtaagtaataccagtaagtaatacttcttactagtaagaaatactagtaagtgaaatttaaaaattgtaatagaaaacttatatgcgtaaaagactgaaaggatagatggcagatgtgaacagtggtttttttcctggtgatttgtatttgtaatttttgcttagctctactttcttcaacagatattagaaaaaagggtcaggcagtggctcatgcctgtaatcccagcactttgggagactgaggtgggaggaatgcttaaatccaggaatttaagaccagcctgggcaacatactgagaccccatgtatatctacaaaaaacataaaaattgagccggacatggtggtacatgctgtggtcccagctactcaggaggctgaggtgggaggatcgcttgaaccaaggagcttgaggctgcagtgagctatgagtgagctactgcactccagcctgggtgacagagcaagactctgtctctaaaaaataaaagttaaaaagaatcagaaaagatacatttttttttgtaacaagaaaaagcccactacagttattttaaaagggcttaaaacaacacgggtggaggtcaagtgtccacattcaatttacatcttcagaattgccaacatagtcctttaacaacacacaatcatatacttccaaagattctttttccgttggtcaaaatgaaatcattttatccttaaggctatacatgaaaaacgcagggcacaaaattgtgttataatggccctaactaggcacagggaaaacaacagcctggaaggagttatttaaaatattcatgattcggccgggcacggaggctcatgcctgtaattccagcactttgggaggctgagtggggcggatcacctaaggtctggagtttgagactggcctggccaatatggcaaaaccccgtccctactaaaaatacaaaaattagctgggcatggtggaaggcgcctgtaatcccagctactcaggaggctgaggcaggagaattacttgaacccgggaggaggaggttgcagtgagctgagattgtgccactgcactccagcctgggtgacagagtgagactctgtctcaatgaaaacaacaaaaaaatttgtgattctctctctgggtaagagacatggtgagaattctgttctctgcctcttttatatgcttaactctatacttcacagtgggcatggattatttcaataatcagaggagttaaagaaagatatttcactgactttagagcccaggccccttggtcagcctgcccactgtgcttccagccaaccgtgctcagaggcgcaggagagctggggtcacaggctggcagtgcactcccctgcaaaggccagacaagaggtaggagccacggggactccaaggcagaaggcctgggacctacggagagtcaaccagcctttcccttctcttccctgtgtacaggagcatcgacaatgagcacctgacatctattatcacatttacgcgtaacaaagaaacccctgataatcatccaggctggttgcggggcttaaacacacaggtggacctaagtgttcacacctcaattcccattctggaaagcatggaaggcatttggcgaatgaatgcattggggggcacggcagttggtggggggccttacctgtgagcaaggactttcccaggccatcaggttgaagacacacagcatggccaaagtcacagagggctgcgtggctcccatcgctggacaggagcacgttgtcagctgccaggccgccccggggaggaagaggaacaggtgagtcatgccgggtcccagcccaccctggctcggtttggcctgccctccagtgatgtaattttctggctgaccctacgtggcagctgctgcttctgattagtttcattaatcgtggaggaagggaggagggtatcaattcaggctagaggtaggcaggatctctgagggcaaagggacaggagcagggtttactcgggaacgctgccactctgctcgcctgcgccgaccccataccaggggtcaccagtgggtgggagcttgaccttcggttctctgtggccaccgtctaccagaaactacagtgcttggctaaggggttggagaacatcattccccttcctacaggcacagtcctgtcagcctgactcagggcctgctactggggatgaccaggctagcccagaactgagaggagatcagacaggatggtgtgagagaagagcctgctggggatcagggccgtggggcctgggccttacctttgacgtccccatgcagaatccttcgtgagtggaggtattccagaccctccagggcctggcccaggtagtacagggcccggtcctctgggagacagccctgctccttgaccagctggcccagggagccacctaggagaccaaaggccaggctatacatgggacttgcccgagcctccatgccagccaagggcaagagcacagggcaggcagtggaaagcagggtcacagggtcaagaggttaacaatggatagatcagtgaccaaggccaacttgggcaagactcaggggggaactcttggccctgaatttggagaaagagtgggacctggctccttaccttccagcagctccatgaagatgttgacccaaggcccttctctcacagctccatacaaagggacaattctgggtgaggtcaatcctgcacatgccatcagctcctctgcccgaaatacttccagccgcacctgcaagggcccagaggcagctgttaagacagggtgaggggaccagagctgggtccctggcatcctgtcagcaccctagtgctccacacacagaggctgctgctgtttccagtggtgatgcaggggcctggggggcctgctggaccctcagaggctaaattgtgtatcccgtgcccttggtatcaggagcaacttcttgtacttaattaaagttctggagtgctgcctgtgtgcaaaaacagccacataaaaactacatccgcaccgggcgcagtggctcatgcctataatcccagcactttgggaggccgaggcgggtggatcacgaggtcaggagatcgagaccatcctggctaacacagtgaaaccccgtctctactaaaaaatacaaaaaaattagctgggcgtggcggcgggtgcctgtagtcccagctactcgggaggctgaggcaggagaatggcgtgaacccaggaggcggagcttgcagtgagctgagattgcgccagtgcactccagcctgggcaacaaagtgagactccgtctcaaaaaaaaaaaattaaaaaaacaaaacaaaacactacattccagccgggcgcggtggctcatggctgtaatctcagcactttgggaggctgaggcgggtggatcaaggagatcgaggtcgggagatcaagaccatcttggccaacatggcgaaaccctgtctctactaaaaatacaaaaattagctgggtgtggtggcacgtggctgtaatcccagctacttgggaggctgaggcaggagaatcacttgaacctgggagtcggaggttgcaatgagccaaggtcgcaataagccgaggtcgcaccactgcgctccagtctggcgacagagtgagactccatctcaaaaaaaaaaaacaaaaaaaaacccacaaaaaaacaaacaaaaaaacaaaaaaccccctacattcgtcatcctggctgctggcacgctgtccgccctcaaatctgccaaacgcagaacattttttcctccagctaaatttctgggcaatttctaggatgtgggaccttttgcttatcaacatccatgtctactctcagaagctgggtttttgacttatctgactgtcaagaaccaagatttggactccatcgggtgcatttttttttcttttcttttcttttttttttttttttttgagacagaggtcttgctctgtcgcccaggctggagtacagtgacgtgatctctattcattgcaacctctgcctcccgggttcaagcaattctcctgcctcagcctcccgagtagctgggactacaagtgtgcgccaccaggcccagataatttttgtattttttagtagagacggggtttcaccatgctggccaggctggtctcaaactcctaaccttgtgatttgcctgcgttggcctcccaaagtgctaggattacaggcgtgagccaccatgcccggcctcaacacttttctttcccggaggactaaaacatccacatagacagagcagtgtttattctgtttgcagctgtctcccagcatctgggaacttaaggaggcttctgaggaggcttctggggagtggccaaggccactcccactgccaaatggcaggtccgggatcatccactcctttctgcagggaccagcaacttggtgggaggaaataggccttggatataaacatcttgggcttagatcctggctccgccttttaaaacaaggcagcagacttcccatccacatatttccacatgcaaacagcagggacggtggtatctgctcctgggtagagcaaggatttggaaggatggtaactgacaccaggcctggcaaccagtgggcactcaggaagtgctagctccccaattcctccagctcacatcagagaagctgatacttagactgacttagaccttttttttttttgagacagagtctcgctgtgtcgcccaggctggagtgcagtggcgcaatctcagctaattacaacctccgcctcctgggttcaagcaattctcctgcctcagcctccccagtagctgggattacaggcacctgccactatgcacagctaatttttcatatttttagtagaggcagggtttcaccatgttggtcaggctggtcttaaactcctgacctcaggtgatccgcctaccttggcctcccaaagtgctgggattacaggcgtgagccactgtgcccggcctcttagacttctttttttttttttttttttttttgagacagagtctcgctctgtcaccaggctggagtgcagtggtgtgatatctcagctcactgcaacctccgcctcctgggttcaagcgattcttgtgcctcagcctcctgagtagctgggattacaggcacgtgccaccacatccagctaatttttgtatttttagtagagacagagtttcaccacgttggccaggctggtcttgaactcctggcctcatgatccgcccacctcagcctcccaaagtgctgggattacaggcgtgagccactgcgcacggcctcttaggcttcttcttcttttttttaattttatttattattatactttaagttttagggtacatgtgcacaatgtgcaggtttgttacatatgtatacatgtgccatgttggtgtgctgcacccattaacttgtcatttagcattaggtatatctcctaatgctattcctcccccctccccgcttagtagacttgtcctccttcctagctgctgatggttctcaagtaagccttgagtagcatcgccagggggcgctggcagtaacagaaccagcttggaagcgatcttcacagacttgctgacttggcaaacagccctgacactgtggggtttttggacttttgcctatcagtggaaaatgtcgcccttctggttccctaatatctggtttggttaatcacctcccatgaactttgactctgccagtgtttccagctctaaaaagcctctgaacctgagttggaactaattcaacaacaggacttgttagcaaatgtcttcagcctaaccacccccaaactgagctgaggcaccccggggcactgcagataactcagaagggcgccaaatggatatctgacatttgagggaaacggccaccgcagtatctgcaggacaccgcgtgaactactcgctcgagacagttcagcttcaaagtacgatcacgcacgtgacattccctttgataatgtatctctatgaagctatgtttttgcaggtcactgtgattaaaagtacttcaaggagaaaatgtgggatatgaaggtggtggtgtcctatctgatttcaagggttgagatgtgcaacaaggcatacatcccgttaataatctggcggtttggaaatggaaggaccctttttctttcaacttatgtcacgcttttcaaatggctactaagttgttaggataaagacttattattcgacctcactgcttcataaacagaactgttgggtatttgttttggcctgggttgccctgaaacaatgactgagatattaacagggctgtgatccaaaagagttggggaaacttggctttaactttgcagaaatctgtaagtcctcttagagtgtcccgtccatgctaaaaatatttccaaccacccagaccaaagaggtgggaggagatacttcaaaatacaaggtgctttagaagtcggtgccagaggagaaagcagcccagccttccaggccaagctggctgcccgtctggccacccctcctctctgaacttccgtgttcctcatccgtaaaatgagggggctggactgcgatgaggatattcatgagaactaagatctaatgcccacttatcatttcccaggcaccggtaaagccctttctaagcattagttattcagatcttacaatagcctgtaagctggtgggatcattatccccattttatagatgaagaagctgaagcctgggcaagtaatttgcccaaggtcactgggtataagagatcacagcagcgcttttactcgggcaagcctgactccagagctgccagctactctgcctcctgaaggcctttccatgctgaactttttttttttttttttgagacaaggtctcccttggttggccaggctggagtgcagtggcacaatcacagctcactgcagcctcgaccttcccgggctcaagcgatcctcccatctcagcctcccaagtagctgagactataggtgccatgcccagctaatttttgtagagatggggtttcgccatattgcccaggctagtcttgaactcctaggctcaagtgattctcccacctcggcctccaacatgttgagattacaagtgtgagccactgtgcctggcatccatgctaatgttttaaaatacacttaggactgagcatccccaggtggaagcactgtcagcaatgagcctactgcctgatacagaagccacttccttcccctcaattgcctgcacactgaacactggggatcactttttcctccttgaacttccctcttgttttctttggtattcttttttttgaaacggagtttcgctcttgttgcccgggctggagtgcaatggcgtgatctcggctcaccgcaacctccgcctcctgggttcaagcgattctcctgcttcagcctcctgagtagctgagattacaggcatgcgccaccacgcccggctttttgtatttttaatagagatggggtttctccatgttggtcaggctggtctcgaactcccgacctcaggtgattcacccgcctcggcctctcaaagtgctgggattacaggcgtgagccaccacacccagccttctttggtattctttttttttttgagacggagtctcattctgtcgcccaggctggagtgcagtggcatgatcttggctcactgcaacctctgcctcccaggttcaagcgattctcctgcctcggcctcccgagtagctggtggcgccatcatgcctggctaattttttggtatttttagtagatacggggtttcactgtgttagccaggatggtctcgctctcctgacctcatgatctgcccacctcggcctcccaaagtgctgggattacagacgtgagccaccgcacccagcctcttctttggtattcttatctgttttattccatcaataaaaaaaggcgtaagagcaattctataaattcttttgaagattccaggaatgtaaactatgtgaaaggggctaccacagtactgtgcacagatgtccaatgaatattagagggtcccgccttattttctcacctctatcgaggtattttcctctgatccttgtgctattttccttctaaacacgtgtccaggactgaaggctgctcacctttaccccaatataaatgtctatcccccattacaactcgggttccttcaggtcaggcctgtggatttcacatctctgtccccagcccctgcacattgtctggcacagagcaggtgtttggtgacagctgggttgacttggccagggccacattatcccagatcagcagcagagccaaagcaaagctcccagaactccacacttgagccagatgttctaaaaggagtgattcttaaccctttttgggctacagacccctatgaggatctgggaaatgatatgaattattctttaaaaatgtgtgattgcccatacatgcaacacagaaacacttttttttttttttttttttttgagacagagtcttgctctgtcgcccaggctggactgcagtggcatgatcttggctcaccgcaacctccgcctcctgggttcaagcgattctcctgcttcagcctcctgagtagctgagattacaggcatgcgccaccacgcctggctaactttttgtatttttaatagagacagggtttctccatgttggtcaggctggtctcgaactcccgacctcaggtgattcacccgcctcggcctctcaaagtgctgggattacaggcgtgagccaccacacccggccttctttggtattcttttatttttgagacggagtctcattctgttgcccaggctggagtgcagtggtgtgatcttggctcactgcaacctctgcctcccaggttcaagtgattctcctgcctcagcctcccgagtagttagtattacaggcatgcgctaccacacccagctaattttttatatttttggtagagacggggtttcaccatgttggccaggctggtctcgaactcctgacctcaagtgatctgcccgctttggccttccaaagtgctgggattacaggcgtgagctactgcgcctggccgacaaacactcttttgaataaatttcctagaattcatggatcctatcaatccatccactgactaggataagaacttctacatggccgttaaaaagcataagagagttgtatatatgccaataaggaaatctgtcatattattgcatgaaaaaaacatggtacagaatagtccctagagtaggatcccatttcttgtggggttgggggacagggtctcactctgttgtccaggctggagtgcagtggtacgatcttggctcactgcagcctctacttcctgggctcaagcgatcctcccacctcagtctcccgagtagctaggaccacaggtgtatgccaccatgcctggctaattttttttctttgtagagatggggtctctacaaagaagtgctaggattataggtataagtgccgcaccgcctgatctttctttttttttttttttttgaggcagagtctcactctggtgttgccaggctggagtgcagtggcacaatctcggctcactgcaacctctgcctcctgggttcaagcaattctgcctcagcctcccaagtacctgggactacaggcacccgccaccacacctggctaatttttgtatttttagtagagatggggtttcactgtgttggccagatctcctgaccttgtgatccaccacccttggtctcccaaagtgctgggattacaggcatgagccacaggcctggcctgatcttacttcttttttttttttttttttttttgagactgagtcttgctctgtcacccaggctggagtgctgtggcgtgatcttggctcactgcaacctccgcctcccaggttcaagcaattctctgcctcagcctcctgagtagctgggattacaggcacctgccaccacacccggctaatatttgtatttttagtagagatggggtttcaccatcttggccagaggctggtcttgaactcctaaccttgtgatccacctgcctcagcctcccaaagtgctgggattacaggtgtgagccaccgtgctcggccctgatcttacttttaattgcaaacaaatataggctcattataaaagaatgcaaatgataccaaaaaaagcaaaagtctccattccccagtcctattctcagaggtaactgccctttgacagatatctttttagacttttgaaatttcttttttatttctattttttactcttttgtagacatgcgatctcgctatgttgcccaggctggtctccacctcttggcctcaagcaatcctcccacctcagcctcccaaagtactgggattacaagcgtgagccactgtacccagcctggactttttatgcgtgtataaacaagtagttgtttcttctattaaaatgggatcctggtggggcacagtggctcacacctgtaatcccagcactttgggaggttgcccaggagtttgagtccagcctgggcaacatagtgagatcctgtttctacaaaaaataaaaaattagctgggtgtggtggtgcgtgcctaaagtcccagctatgtgggaagctgaggcaacagggttgtttgggtctgtggggctgaggctgcagtgagctgtgatcatgccactgcatactagcctggacaacagagcgagatcctgtctcaaaaaaaaaaaaaaaagaaagaaaagaaaaaagatcaaacaaaaccttaaaaataaaaacaactgcatcaaaccctggacctatggccaatcagcatctagatcaggaggatgaagggagtgctggcactgccacgtgacaccttacacactggattctccccaaggagcatcaggggggcacagacttgctctgatccgatgtgcagcctgacctctgatgcctgatccacctcccggtccccatctcctaatcagggaactgtttctcctgctcttccagctgaaaaccctaaaggacaccactgccttgagggaaagcaggggctgtctgcccaaccaatggcagctgtgcaggctgccaaagagccatccccactgcattctccggggtgggaaggaagtggttctgtgagtggcagctctggtgggcttgagctgcagctctggtgctgagaagtccatgccttgtgcttggagcttttccaactgccttgcagtggatgcgaggggcgagacatggagtatttatcctcttccactatattagggttgtttaccttgttgcctgggaggactcttgaggccctcagcaggggaacagctgagaagcccagtgactaagctcccagcactgggtgcgcgtctcttcacactctcacactctcctcccaccacctctcaagagggacagctgagccttctccggtagcctggggaggggaattgcagctgagcaggtcaggcacgtggccttggcctcccccagtggaagacgatgatccacactggcaagaactcggcaagaactcagcacgcactcagcacgtgttgccagtcaggggtggtgagggcggagttttcgtattcgacacagtgtgtctgaagtttggggtggtacctgcagatagtcccctcactggtctcaccatccagcccaagtacacaccagggaagccgggtttattcacatcccagctgtctcctctccccttaaggccacaggcaccctggacggtggtggcagcgtctgctctgaatggagccagcgtgtgccaggcttttgtgctctggctacagtgagcatttcctgtgtcaggttggtgctccaaaagttttggattttggagcacttcagattttgggttttcagattgcggatgctctacctgtatttgttgcttttctttcggggattggagtgtctctgacataagccacttgaaacaaggtatatctcagagcttacttcaccctgcccagagggccaaggggatggtccacagaaacgcgccttaggtcctggtgctggctttgaggccgagagctttgactggggacaaggtggcttccaatcaagatgatctgagagttgggggtgggggaaaggttggtgacagggagaaggaccgacacctgtaaggtctgtcggtctgcagccgccaccgatgctccctctgggcccggatagtgtgatctgacaggaggaggcctcagctccaggcccagcatgccacactgtcctctctgctctccacttctaacatcagtgagatgaaggggtgggaggggtgattcctgtcttctgtctctactcaaaactctaggacaagaagtctatcttcttccctcttcttcctgaagagtggttgaaagccgaactctcaggtcagacagacctggtctgattcagggctcttgccacccggccagtgacttcctgtcttgccaagcttcatgtccccaacatgtctgtcttgcaggactgtggcacgcctggccaacagggggcacagctccgactctggcagatctgcccactcccactgaggctggcttcctcctagaagcaccccacaggtggaggctactgctttcctatcatctggcccaggtcaggggcggcctcctatgtggttcaggggttttacctcagtgtgaatttcatgacgctccaaccatcttccacgttgggacttgcccctcaggccctggctgtattgagacaccgaggccacgtgtgtcctctcacactgcctctcacatacacacatgccaggggcagcagccaggccaggacacgtgacaggctgctcccttccagttccagccgacctcaggtggctagtgatagccaagttctgttcacaagtcagacccacggccaccctgcgactgtcctggacagaaagcagagggaacacaccaggcccccttcctggcttccctcttcactcagcccctgagccctggcgtacctttttgacagcgcactggaagccagtctgcttgtcctccatcctgtgcacctctccgaaggagcctctgcccaggcggagctggtgcgtggcccagtggacttcttctcggtactcataatccactggcttgagtttctggggttggcaggagagagaggacagtttcagtggccagggcagcagagggctacagggctacagtgaggaagactctccagctggtgaccttgccagggctgctgagctgagccctcacaaccaggcagccctggggcgaaggcagggatctgagccgggcagcaccagagagggggcagaggaatgaagtgaaggcgagggaagggttcatgggctgcggccactgatccttgtgatgaaaaacatcccagacttgtgatggtgagacagaaacagaactgccaatcaccttgacaatgaaaaaacaaaactcaggagctagaaggtggagggaagggaggaacagtgaagaggggcgggggtcaaggatgatgttaaaagtggatggaggggccaggcatggtggctcacgcctgtaatcccagcactttgggaggccaaggtgggcagatcacttgaggtcaggagtttgagaccaccctggccaacatggtgaaaccctgtctctaccaaaaaacacaaaattagccaggcatggtagtgcacacctgtagtctcagctactcgggaggctgaggtgggagaatcacttgaacttggaagggggaggttgcagtgagctgttatagtgccactacactccagcctgggcgacagagtaagactctgtctcaaaacaaaacaaaacaaaaaaattaaaaaattaaaaagtggatggaataagacagtgcagtggctcacacctataatccgagcacttttggaggccaatgtgtgaggattgctttagcccaggagtttgagaccagcctgggcaacatagcaagacctcatctctattaaaaaaaatatagctgggcgtggtggtacacgcttgtagtcccagctactcggggggctgaggcaggaggattgcttgaacccaggagacggaggctgtagtgagctatgattgtacgactgcactccagcctgggtgacagagtgagactctgtctcaaaaaacacatttattaaaaaaaaaaaaaaaaagtggatggatggaataaaacccggaaatcaaagtttgataaaatcatttaaagttataaaattatttgggaagttaacaagaggaaaaagggaaggaggtgggtggtgaaaacaggtcccatcctcatcttccgtctctgggggccatgataacatctccagtggctcctggctgattccccttgtcctcagcatgtgtactattaatgcagtgcccacattcagcaagcaggaggtgaccaaccagaagaactcagaacagaagacgctaaaaaggctgtgagaagtgagattggcggaataagagatgatacttttcatccacaatgagcactgtcctactgtttgatttgtcaccacaggcaagagtgactctgataaagagagaaaagcatcccccaggttgctggtagagggacatatacaggtgccgggggattagttacctcagtgagcaggacaccctcgttgtcctcagttttggggctgggctcccgggatctggagccccttgctgcccaggtcttggccaggctggtcaggctgtgggcctggcctgagctcacgctgccttgcagagcatgcactaggtattcctccacagaaaacttctcatgggcaccacgagacaggcagctgggctccaggtgtgggccaggcaggggctttggactgtctacacaggccagtttgctcaggtgtgggtcaggcaagggtttctggctgtctacacaggccagtttgcccaggaaggactccagagggtgaggtttccagggctggagagggtggaatgggaagggatgaggcagtctgctataggggaaggggtgcgtgggcaggggcagggggcctccgtcctgggggtggtgcagtttccacacgtggttcagacattgcaaggggctgatcagtttgtggagttctgatcgaggcagagccggccgtaggccctcgccaagctgcttaaaacagagttgcccaaggcctggttccttcagaggcttggtgaactgcggggtgtttctaacatatggggcgccgagtggagactcatcctcctgcggggggaaacacagctatcagcacagagggccagggcccagggacaggctccaatttcaaggccccatgaacctggggtctgggcagtgggtggagggtctcacctgcactgggatggtgcagctctcctgctcaggggtcctggggaggggtttggccaaggccactcctgcatgagccagggactttgagctcttcttcttccgtttcttccgggctttgctgcgacgctttcccttccaacacacacgggccattttgccctctgtagcatgggccacattgttggggatctgatcaagactctcggactggctgtcacaaaagggacagatttgcatattgagcacgaggaagcaggaagatggactggtccagacacttgtatctggactcctgcagatccaaggtcaaatcccaggttgccattccttgtgtgaatgcggcaaggtttctaaatcccaaggaacctgttttctcacttatctcacttataaaatgggtttggtattttctgccatacagggtggaaatgaagtttcaataatttagttcatttaaaaagcccagctcagtgtctggccccaaggcaagctgccgagaagctgtgcttgttactatggtgatggggtacagactcagcacttcttggggagagtcaggggagcagacacggttcgctcactgctctccaaggtgagctgcccctggagagttcctaggagggggccacgctcatggcaggcctctcagctctgactgagcagagcttgtttctgttgcctccggatggaggaacaggtaaggctggtcacctccattctcacagttcctgggggtccctggctgctgttgaaggtgaacagcctgggctgctgcctggtactggggagcctgcccttctctgctggcctcggggctcatcactgccatggctctaactggactgggatccctgccaagtattaaaggacccggcaacagatgggttgctgcagaacagctgtggagcagatcatggcctcagccaccctcccttggcctcatcttctgcccccatggagaaggcagactcatggcagtcctggggaccactggaggcctacaggcttctcttggacagctgaaagaagtgtgtctatcagaggctcctaccctgggccaaaaggcacccaggacagcagaaggaatcccaccaaactgagcatttcttggttccaaggcagccagctgccctccccacaatcttatcactagcaggttccaaactccaatgatacaaaacctgcctggtgataggggaaggagctgtttctagcttgaactcttgtttttttttttttttttgagacagaatcttactctgtcaccaggctggagtgcagtggcacaatctcggctcactgcaaccttcgactcctggattcaagcgattctcctgcctcagcctcctgagtagctgaggttacaggcatgcgctaccatgcccagggaatttttgtatttttagcagagacggggtttcaccatgttggccaggatggtctcgatctcctgacctcgtgatccacctgcctcggcctcagaaagtgctgggattataggtgagagccattgtgcccagcacttgaactcttgtttcaaaaaatcatctgtgggggaatgcagagcctgggaacagactcagccccaccctggcttcctttctaccgggccaccaagtctatctgtcccctccttttctaccgcccgcatccctactcggtgcatctcccaggagaaaaggcaccagcaggtttctcccatagaggacagtggaaggccccccccaccaacccggcctgcgctcacggtcacgcaagagtgggaagcagcttctgttcccagcaccctccctgttgatgggaaacgagggggtgcattaaggactctgaggagaataaaaataaaatgtcaagttgatgtggcccagaggcagtcagccacaagctgtgaaaagcctttgaaaagcttatttggctgagagagcggctcagccaggaaagcctgggtgagttccaggagctgaaccacaggtgctgagggagggagcccggggtcagcaggagcggcccaggcaagtgctggggacgagggcgctgggtccagtccccaccttcccactcaggcttgtctcccctgcttacctgtactgtttggacccagcgatgaaaatgcgttctgaaaaggtggggctgaactcttggctattctcacctaaagcaaaaggagttggattagcagagaggagaaaaaataggaatttagcacttaggggagagacattttacagagatcccctctggcgcctctccttcccctcctttccagacaacccctgtctggcagtcacctccccaccaatgcctccttcccgcactgtctctccccagcttctcagcttactggtcaagagcagaccacggcctcagccacctgctctgaaatagccaagcctatattatggggatcacagggcgcccgcctcacttcctatgaagctgaagtgagatgatctacagaaaatgctcaacacagtgcctggctcataggaaaaacagctattaggtatttatatatgtgtgtacatataagtgtggatatatgtgtatttttttaaaacaattattatgtcactctctgtattttagtttttattctctcatctctcctcaaaaaccaaccaggaggaagtgggagacgagggcaggatgtatgcgtgtggagaaatgacagcatggctgtccagctctccaggttccaccccaagaagcctcccgggttgagggaaggcgttggagagagaggactcccggccctacccaggcctcgtgggagtttctgtctccaagggaagccaccattactagtcatcataaggtatcatgagtagaagaagaaaggaccagactaggtctcaccctgcagcagcctgccgccccaggactggcccagcaggctcaagagcacggtgctcattcctgggggtggggccacctctaggtggaagatggtgaaggccctacaggccccagtggggctttccaggagacctggcctttcctgtctggagcctctccagacactggggctgctcaaggtcacagcagaaggttgatggcctgcttgatgattctgcagagtcccgagtgctcgtctgttacctctcttcccctgctccagtcacgatgggcacagtctccccttgccacatccaccatctgtgcacttttacaaccccactttccatgattctcggcacagacctctggttgtgtctcatgagaatcttatctagcagtgacacagacctctctcctccatagggaacccctgggcccagctacccacctgcaggcccacccacctgccccgtgcccacaacaaccctaggcccctacactcagcctgggcgatgatagagatggcagctggccctgcctcggagccttccttggctgtgcccttggtaatcacgtcattcaggatctcccactttccgcagaacacagggctcttctccacggcctcaagcttgtagacggagctctgtttcttccccagtggcggcgtcttctccttggctttggggagttccttctgctgccccactgctgagccaggggcacctgggcaggccatttccatcactgccatctcccaggcttgtgctcatcctgagagagaccaaacacagagcaggtcacttagaatcccagacctgggagaacacaggtcagccttgggttgggggagaaaggcaggggcaaagggtctctgcctgtttatgtgtgcctctgccacacatactcatcctccaaacatcctcaatggtaacagagtccacctctcaacagctacacgttccacacggcacagtcccccggtcctcccagtaccacaacataaacagcctccttcactgtgtccagcaaggatgccagcccactccctctaggagagctgtggcacaaatgtctgggttggctctttcttgcctttatgatggctcgatctttttctgttgttttatggcaaactttgtttccccaggacagggtggtgaatcccagactccaaaaccatggcctcactgaccccacataagcctttggagaggacctgttggcacacaccatccacagcgacttttctccaagtggagagaagcaaggttctattctgttccctagtaggaggtagatatctgtgtgtgtgtgtgtgtgtgtgtgtcctacaaagtctaaaactcagcatgcaaatggtgctcagcacgtggttccttgcccaatgcgtctgtttgtggctctccagaaggaactaacatgcttcctcctctaatgtccaaactcattggctgaaaacttctaggtatcatttttcattcaggcaacatcaggagtagaatttatattcaaggccctaacacgaacctatacctctagaaataaagaataaagcataagaattcacgtctctctgggttctgtcttgcccagccctaggaagctgcaaagaagagcaacccagagttgccaacaatctgtgcaaacagcctgcagactggaattggcaaaaaagagaagagcactgatttgagactgttaccatttggaaacctttttaaaggctgggagtttttaaagggcagggcccctctcaggcatgacttgctttagaaacagcctgagaaggtcccaaatgcagacagatttttaataactgctctctgatggtaggtttgtcttaaagctgctaccagcagaaatcatcttccttgctataactctgtgaaccctggatcacttctctgcttctggggcagacaggtacaccatctgaagctgaactctaaggcctctggccttttgccctgtgaggcctgaggactgaatgagatggtgggaagctgaggtactaggttgaagcattcctccttctgaatctgcctcactggtcttcccacctcgatggctatgaaaggctctgccagcttggctggcgggtgtggtggggtttgttgttcactattgattagttccttgcatctctgtctttaagggtctcctagctctgaacttggagcagctccagcttcctgcaaggatgcctggatttggtaccaaacgccagatgctgaggaggctgaatgggtggcctcactgttacctgaggatcttaagaagtctgagggggccggacatggtggcccatgcctgtaatcccaccactttgggaggctgaggcagaaggattacttgagcccaggagttcaagatcagcctgggcaacatggtggaaccctgtctctacaaaaaaatacaaaaaattagctggggtagctggcctgtagtcccagctactctagaggctgcggtgggaggaatgcttgagcccaggaggttgaggctgcagtgagctgagattgcaccattgcattctccagcctgagtgacagaataagaccctgtctctaaaagaaaaaaaaagtctaaggggtgttctgacatccaattaggcaaaagcccttcaaggctggctatgcttcttgtaactgtactttcatcccacctcacacctccccaccccactctacctccaaaaaagaaactgacctaagcccagagccgatcccactgttctcagcctctttaccaggggaaatgagatcttaagaacagaccaaaaagtctccaaacctaacagcagtagggaatgctcacagggagctcgatgtgagcgtgacctcctcatttctatttgaagaagctgaggcctaattcagtggagacttgcccaaggtcacccaacccacgtgtgacaggacatggccaggatccagaccctaggttctttaggctatgatgcccactccccaagctcctgggttacaggcaaatgcaggagggcacactaaggtcctccctggtcaacaggctcctgagggaagaggtggggccctgcacacagtgcctccccagtgtatagcacaggggccacagaccacgcaactgacgctggctgaacgagggactcaaaggacaaagattgcttttccataacctttggagacaggatgatcccgaatgctgaggaggaagagagagtcctgcctgatgaatgagaaaaatgaggccaggtggtgcagttgctgctctgaggggcacgtggctattagagatctggctgtgtgggggctctgatagcctgtctccgcctggcatggcccaacggaggcttctggataggtcatcctgagctagaactcctccagagggggtgcagggcatcccgagtcccagagttgtcctttcatattggtgttaggtaggcagctgtccagcgcccctctgtgagcacaccaggctcccctcttcccagagaagtggaagctgaggctgaggcagccacgctcagagactcctttgcagttccccgatgactcatccaacagcctggcaggcagacagtaacaaggaggctgttgagaagctgacccagcagatggcagctgaacttgtgaaggacatggggaaaacaggctgaccctcacctctcaggggcacaaatcacggcctgggagctgtaaagctcctcctgtggctggcttttctgtgccacatcaccatgactcagaccctcaccgacagcctccaagttcaagaggctattcttgggacactttggcctgacagtggctctccccaaacaccacctcccacacagacacacatgcacacacacacatgcacacacagacacacacacatacggatgcacttgctccctccctcctttcctaattctatctggactctggtctacaaaaatcatggttctgtactaagtccaggactactggccagggggccttcccagccctggactttggtctctggctgtcaccccagctcatggccctaacactttgccccttctccctcctgcagcgtgtggggaggacgaagtgggagccagttatgtctctgcctttgaaggcaagtcaaactcctgattcattcctcagcctagacactctcctcagcttattcacgccccaaaggcattgggccctctactctctgcataagagttgaggacacgagcagtggcaacagccaaacccacatggctcacccataagcccaagaaatcagaagaggaaaggaaaggagcagaattcactccatattctttgaggcctgatgcacagacactgttggttctttcttctgtgatgcctcagtgacctcctggagaagcctgggggataggaatgatctggacagtaccagatcaacctctgggcatagctgtatgaggagttcttaatctaggttcaaggatggattcagggagaaaaatgtaatttgcatttttccagggaagacttggtccatagctttcaacagattctccaaggatctgccattccccagaaggttcctctagtctccctagaaaatcagggccgggctaaatgcctgattctggctctattcttccactccgaggaaaagctctccaatgcagcagtttccaatctgaccacagattagaataaccagataagttctttaaatgcattcctcctaggcctgctgaaccagtcactgggcattaggcccagaatctgtacttttgacaagttctctggatgattctgatgccaaagggccagagactgccacctgacccctgctctgtactcaaggcgacactgtccaaaatggtagccactagcaacatgtggctatttacatttaattaaaatgaggtaaaattttaaaatcatttccttgttacactagctaccatactcaacagtgcagacagagaacatgtccagcattgcagaaagttctattggacagtgctgttctgaggtgatgagagcggtgttttctctgacagtaaaatttctgttcctaggattctggggcaggaatggggtttacagtaaacaaatttttgattcactggaagatacaaaaacaatgttttaaatgttaatcttcacagatgataacctttttagaatatatcatatttcattcagttccctgttttagcaagtacaacatagtaaaaattccagactgggaaccagaagctatgggttctagccttaacaatttttttttttttaagaagagcagtgggaccatttttgtcaaatgaaatcatacctcatctcccaataactaaaagaaccagatgcatgcaactggcatgtaactcacatttgaacccgctgccctggctgaaggagctccacatgctcagtgtcccttcatccaccgaggacctctacaaaatccctagttctccaagaaaagagtttggaaaccagcggcctaggaaatcttttgaggttccttctagttctgagaatgtagcccatctgtcaggattctttgagggctggacaactccaactcagaatactaactgtcgatacttacaaagtacctactgtcatctcattttcagacatgaagatatggcttagggaagtgtagtagcacaccaaaagttacgcagttgcaggttgcagaggtggggttgaacctagactgctgcctcctaagccgacatctaaaccttgagctagccacttcttttaacttctctgagtttcttctcttagctccttcagagctgttttgaagaccgaatgaagacgagtacatgaaatgccaatcaggttgcctggccaacagaagaggctaaatgaatgttcattcccttgtctgtcaccaggctactaaaagccatcactgagaagatgggacttctctgtttcagcaccatatagccaaggtatcttgagccttacctagttcatgcaatgcttggagccttgattctccatacacgaaagggaaataaaactctgtcttacagggccagcttgaaaatgtctacaaggggccaaggcaaatccctctcatgactatttcatctggaagtaaaaacttgtccttctctgaatgcccagaggggataaatagcagaagtagaatgactcaacttccttaataagatattggttgaaaaccaatcttctcccaacttcctcttttaagtcttcagcttgcctggccaccaggccacaataggcaaacctctgcctactcaaagtgcggggctgggctgggtgcggtggctcacgcctgtaatctcagcactttgggaggccaaggcaggaggatcacttgagaccagcagtttgacaccagcctggacaacatagtgagacttcatctctacaaaaaattaaaaaattagccaggcatggtggcacacgcctgtagtcctagctacttgggagcctgaagcaggagggttgcttgagcctgcagtgagccatgactgcaccaccgcactccagtctgggcaacagagcaagaccccatctcaaaaggaaaaataaagaaagaaagaaaaggaggggaaaaaaaaagagggaaccaagggcaagtatcaggcagagcaagctggcctggcaaaacagccatctggcgaggcagactcagaagtccccatacatgctcatcctgactcccctttctaccctttctgcccttcctacagcccttcccccagtttgttccagactgattccttcacttgcccgagcagggcagcactgggcaagcctctgattctcttcttctgcccaccctgttcctcccatagggagtggctgcttgccttcctcccttatcaatgtctgcccagatctcacctatcctttaaggcctatctactcaatgaagccttttatggtaggcttctgcatccaccctataaacattcaatgagtgtctcccaagtgccagggaatgtaatagccactaccgtccataaatgtcttctgtgtatggggcactgtgccaggaactctatctgccttgttaatgcattccacaccaaccctgcaaggttggcaatattatctccaattttacagatgaagaaattaaggcttagagaggtacattacctacaggaataaatgaggctcaatttatacagttagagcatccaacatggagttagggctcaagccaggacactcttggcccattctcttaggacccaaggatctctagttccttcctagaataaaatctggttggcagaggcatctagaacatccaggaactgagcagtattactacccatgtggatattactacccctagcatctgcccatctactgttggtaataattccttagcccaggtagacaggaagcagacgaagatcccttactgatgaggggtcttgtcaagtcagggctgaatcagccatcaatttgtcagacttttagttcagttacgccactaaatcctgttatgttatgtgttatgacttaacttgatggttttaacaggtcgtttcattttcttgaaacaatcaaacaaatgcacatctaatacacacatacacaaacaggagttctaggtaaggtggcactgccttcactgaaagaaccactgaaggatgtactttgcaaagaaaaaagtaaataggaaaaagaaacaatggtaggcacaggaactcaaacaatatgttggtcaatttaattaacagttgaatatgagaaattggtttaaatctttttttttttttttttttttgagatggagtcttgctctgtcgcccaggctagagtgcagtggcacaatcttggctcactgcaacctcagcattctggttcaagtgattctcctgcctcagcctcctgagtagctgggattacaggcatgtgccaccacatctggctaatttttgtatttttagtagagatgggatttccccatgttggccaggctggtctcgaactcctgacctcaggtgatctgcctgccttggcctcctaaagtgctgggattacaggcatgagccaccatgtctggccagtttaaatcgttttaaaacatgaaaatctagacaccaacaataaggaagatgggtgaaatgggttgttcaatgggtaaaaagtaacatgatccttgcctttttggggactttatgtacaacaacttttaaattttattagaaaaaattacagttagtatgtatgttgatttaagagtaatgactaaaataatagaaatacaattcagaccagaagaataaaggaggaaaaatagaaaatgctgtcaatctgatacaaggcaaggcaaggaggaaaaaagaagcaaaaaggacaataaatataaaataaaaacacaagatggcagaaataaggcaaaatattagcatgtcattaaccacagtacatgtgagtagattacaaaacagcaaaccagattggattttaaaagatccagctagatgctgactaaaagaaacaaaacaaaattatccagaaaagttggaaataaagacatagaaagagatgtgccaggccaatattaaccacaaagaagtaatattcgtatcagacaaaatacttaagacaaaaagatataatcacttctaggcacccgataaagagcctccaaatccaatgactggaggcaggctgaggctttatgttgagtaaggtcttggccccagagtgtcctgtctagctgcagagcaaggatcttatgcgtggcagttcctgggcatgtactaggtctgctgggtgttgggccccgtgctgagtgctggcagtacactgaggaagaagacactgtcccttgaggatcttacagtctactgggggaaacagacaagaagtcagaagagttcagtacaatacagggatgcaatgacagagatagacacacagcagatgtgacgggaacacagagcgacacctagtccagcccaggaggtgatgcctgagctgagtctgaagcagtgagcaagacctgcccaagaaaaaggagagggtgttctgggtagaggggatggcaaaaggtaaggcacagaggtgagtcaatgcagcaatcaccagcagcttgaagttgtcagtgagtaaagcgtaagtcaggcagtcccaggagaggaggctgcagatgaagttcagctatcagaccatggacacacgcttgatcctcatatacccccagggtttaaattctcagatgagtgagcggggtataattccacattcctcccagactcttgggggtaaagttccagatggcagaagctgcagagtaggggcagatggcactggccaggcacagtgcctcattcctgtaatcccagcattttgggaggctgaggcaagaggatcacttgagcctgggagtttgagatcagcatgtataacataacaagactgtgtctttatgaaaataaaaaaaaagaaaaaagaaaagaaaatcctgccattggtacagaacccccaccctggcctgggctaacaatctgacaagtgacaggcttctgaaaggcttgcttcactctctccctcaggcggagaaggagaatggccatgtgatccctgggacatagaaacagatgtctgaggaaggaggaaggggccttactggggcctgcactcaggcactgtgagtgaaacgcagctggaggaacctcagaactggactcattggcctgcttgaggcctgcttcccaggagagtaatttctgaataagcatttcccattaaggaggatatgaaatgtgaaggtacattaatcattaaaatcttacagatcaattattaaaaagaaacaaatctgacatgccctcaaaaactcagtctcggccaggcatggtggctcacgcctgtaatcccagcactttcggaggccgaggcaggtggatcagttgaggtcaggagttcaagaccagcctgggcaacatagtgaaaccctgtctctactaaaaatacaaaaattagccaggcatggtggcgcgtgcctgtaatcccagctactcaggaggctgagatgagagaattgcttgaacctagaggtggaggttgcagtgagccgagatcgcgccactgcactccagcctgggcaacagagcgagactccatctcaaaaaaacaaaactcagtcttgctgccaatcccacaggtcaaactgcagggtaaatacaatttatggggtaaagtttctgactgtcctgcaattaccaccacatgcctgatgatggctggccggccctagccgtgcagaaactactgtctataaggccccttcagatgtttagggcaattccctcgcatctattctattggcattggtcttacccacttccagcttctctctgacctcccaccctggcgctgagctaatcttgaaacatcgtgtacttaagacaacctcaagctcaaagacatctgctggctctgcactgcttatgggctcagtctcagctctgtggtccataatctttttggccattgtttccccaaacatagggtttggctttggccagtctgatctctctacaaccccttggctactcaactctccaggtcccatgtgtgccatgctgttgtgtgggccaccccatacatcctgcttgtccttcaaaggcaaggctcagcctctacccaggaagttcctcccatcagctccactgtacaacggcctccttttctgcctgcccacagcaccttgtctcctctatcctcatcctcctcctggtcctgacacccccactcccttttactcattcaatgaaacaatgtagatgaaggaactctgggaacaataaagcatcatagcaagtgaagatacccactttttgtgtgcacaactcacagaattgcaatctaagtagggaacaaattaaaaaaaacagaaaaaagcataatcaaaaatgtttagggctgagcatggtggcttatgcctgtaataccagcactttgggaggccaaggcaggaggattgcttgagtccaggagtttgagaccagcctgggcaatatagtgagaccccatctttacaaaaaaatacaaaacttagctgagcatagtcacacgtgtctgtagttctagctactcaggaggctgaggtggaaggattgctttagtctaggagtgcaaggttgcagtgagccatgattacgccactgcactccagcctggacaacagaatgagatcctgtttcaaaaaaaaaaaaaaagccgggtgccatggctcacgcctgtaatcccaacactttgggaggccgaggcaggcagatcacctgaggtcaggagtttgagaccagcctgaccaacacagagaaaccccgtctctactaaaaatacaaaattagccaggcatggtggcacatgcctgtaatcccagctactcaggagactgaggcaggagaatcgcttgaacctgggaggcggaggttgcagtgagctaagatcatgccattgcattccagcctgggcaacaagagcgaaactccatctcaagaaaaaaaaaaagttcacagtatttctataacagtaaaaaaactggaacaaaaaagtctaattacaggggaaggataattattaaataaatcatggaacatccattaaaaatgtttataaatcattttaacaatatggaaaaatgggatattaaattagtagaaagaggatacagaagcatatctaaaatacgaccctatatacatgtgtcggtatattacaatgatatttataaaaatgcagatacctaggacatatagcaatggttctcttttggtggtgggcttatggatgatttaatatttctttttatacctttctaatttttccactttttcagtgagcacatattagttttctcagttctctttttttttttttttttgagatgcagtctcactctgtcaccttggctggactgcagtgacacgatctcagctcactgtaacctctgcctcccaggcttaagtgatcctcccatttcagtctcccaagtagctgggacaggtgcgtgccaccacgcttggctaattttttgtatttttggtagagacagggttttgccatggtgcccaggctggtcttgaactcttgagctcatgagattcacctgcttcagcctcccagagtgctggcattacaggcatgagccactgcgcccgaccttggttctcatttttaacagataatgtttctaagtggttaaaaaaaaaaatacagaaggggtgccattgaaaagcatgagtccttccctccattcctataaggggatccccgttaacagtttcttgtatctccctctactgattttctctgtaggtattacttttattcatttttattattgttattatttttatgagatggagtctcactctattgcccaggctggagtgcaacggtgcgatcttggcttactgcaacttccgcctcttgggttcaagaaattctcctgcctcagcctcctgagcagctgggattacaggcgcctgccaccacacccggctaatttttctatttttagtagagaccgggtttcaccatgttggccaggctggtctcaaactcctgacctcaagtgatctgcctgccttggcctcccaaagtgctgcgattacaggcatgagccactgtgcccggccaagtattactttttaatcatgaaaacaactaaaaaagaatctcttggcatgggatgagaatttaggaagcattaggtccacacttgagattggggctttataaatatgtgatgagctggtttctccaaccgtgtgcgcgcacatgcacacacatgcaagcacaaacccatgtgtgggcaggaaacttcaccagaaagtctgtggctcttctgttctgctcactgagttctggcagctgggccgcaaaacagaaggctggagatgggcaagcttgtccttcctggttttggttttcatttcattccctcccttgttctctgctgaggactgagagttttatcagttgtgactcaagaaataggaaggtgctcagaagatgcggactgtttcctgctttgatttatcgaatggcaaatgcatgcgtggttacaggcccgtgctagtgctggatggaccacatgcccctgggcaagagtggccccccagagtgaaaaacagcagaagtggaccagggagaaaaaaaccagcccttcctccactgcttgcgcaaaggggtgggaatcgcagggttagtcctagtctgggaaacccaagggaggacagttttcctagctagcctctcctgcctttcttatatgtgatctttaaccttgcttaaaaattttttttcaggccaggtgcagtggctcatgactgtaatcccatcaccttgggaggccgaggtgggtggatcacttgaggtcaggagttcaagaccagcctggccaacatggggaaatctcgtctctactaaaaatacaaaaattagctgggtgtggtggtgggcacctgtaatcccagctactttggaggctaacgcaggagaatcacttgagcccaggaggtagaggttgtaatgagccgagattgcaccactgcaccccagcttgggcaacagagtgagactccatctcaaaaatttttttccaataccaaaataattgttcattgtaaaaatgtaaacaaaacaaaattgtatatagaaaaaaaatcccggcaccgtcccgtcctctctgcaacataaaaaacacttaagtttcatgtaaatccttctagttccaattactatacatatataaacatatagtttgggacttttttttttttttgtatttttagtagagacggggtttcaccgtgttagctaggatggtcttgatctcctgacctcgtgatccagccgcctcggcctcccaaagtgctgggattacaggcgtgagccaccgtgcctggcctagtttgggactatttttaaaagaaacatggattatacacatgtaatgtcatacaaattgtatctttcacttaagatactatgaatactattccatctcagcacatttagatttatttcttttcttttcttttttttttttttttttttgagacggagtctcgctctgtcgcccaggctggagcgcagcagcccattcttggctcactgcaacctccgtctcccgagttcaagtgatcctcctgcctcaaccttccgagttacaggcgtcagccaccacatccggctaatttttgtatttttagtagagacggggtttcaccatgttggtcaggctggtcttgaactcctgacctcaaacaatccacccgccttggcctcccaaagtactgggattacaggtgtgagccaccatggttgacctctaattcattctttttaaggcttcataagattggaaggtacagatgtatcatcattttcccacctggaaactttgtttccaatttttcacttatacgtaataatggaaaaaactctacccttattcacatttatgtgtacatgtagaaggaattctaggtggtaagctcttgggattggaatttctgggtgactcttttgttaatgggttatatcttttctcctgtttctatgtgtcagagaagtagatagcatcagataggtggtttccaaacattgtattatttatttgctgtgaagatgctatccttgctttcaacatgcctatagtctagatggggaaaaaatgggtagatggataaataaatcataaaggaataatcaaagtgctcttaggatcagaaagaccctcagaggtaatttcttccaacatattacttactaatcctgaggaatggccattcagctacatgacaggatggccttggagtcagaagatctgagtttgaatcttagtttctcaatactctggtgtgtgaccatgggcaggtcacataatctgagactcaggagtcttatctgtaatatagggatcctcaaacctacatgatagaattttacacggtgactcaatgcaaggaacaaagtttaaattacatagcacagtgcctggcatgcagtgggcactctggaaacatcagtggaacctccagtgagatggaagccgctacaagatgagcagtcagacctttgtatgactggaagtgtaagattttttttggttttatgtttttttattttttttattttttgagacggagtcttgctctgtcgcccaggctggagtgcagtgacgcaatctcggctcactgcaagctctgcctgccgggtttacaccattctccagcctcagcctcctgagtagcgggactacaggcacccgccaccacgctcagctaattttttgtatttttagtagagacaggatttcaccatgttagccaggatggtctcgatctcctgacctcgtgatccacctgcctcggcctcccaaagtgctgggattacaggcgtgagccacagcgcccggccgtttttttttttttttttgtgagacagagtcttgctgtcacccaggctggagtgcagtggtgtgatcttggctcactgcaacctccacctcccgaattcaagcgattcttatgcctcagccacccaagtggctgggattacaggcatgtaccaccacgcatggctaatttcatttatttatttttttgtagaaatgggattgtgccatcttggccaggctgatctcaaactcctggcctcaagtgatctgcccacctcagcctcccaaagtgctaggattacagatgtgagtcatggtctataagtgttaagttgcttcaaagttgctgctataaggcactgaagcctacctcccacagcttctagccagcagccctagcatcagacagaaagtctggaacagatgtggtcaaagcaggaggaggacaatcctgaaagcagagggacagagtggtcggcaagaacccatgaagatgttctttgaagagcattctgcacaccccatctggcttctgtgtccactggcagtgcctcagctctgcgtgatgaactgggacccacaattccttggcagctaaagctgaaattagttgtcctgtggtcatctttgagtgttacaacaatctgctatttgtatacacataactacatgctggttgttggtaatcatacaaatgaataataatgacagctattattatctgccatgtattaggtaatgcgtgcatttttttcttgaatcctcacaactctgtgagcaaggcactaatgttatccgtttacaaggaggaagaaactgggcctcagtaggccaagtaatttgcccaaggccacacagcagtgaagtggcagcggcaggatttgcacaagagacttttatgtcaaagcccatactcttaaccatgacactcttcctactcccaaatgatctaagctttaaaaattgggaccgagatgcagaagctgtcacaagtcaaaggttagtgagaaattcagggactggcctgggaggaagcaccttaattaggaagcatgaactacagccagcctatgttctggaaaaagcaactttaaaatgacaacagggaagaaagactccaagctggacttgtggtgggcctgtgttcctcagcccacccaggcctgacatagccaggcccattccaaggagaaattctatgacaaatgcaaatttgccattcactttacaaagcctggctgcaggcttcttgaacctatttaccattctttttataacaaagactcgagcatcatttgctatcttcataaatttcatcagtacttttgcccccaggccctgatacagggcattttataagctttaaaagagaagtattacaatggtattttcaattcaaccttcaaatcctttgcacaaggagagccaacagcaaatagaaaagacgccacagggggcatcatggatccacaaagacccaatatgcaggagaacatgtcgggcaaggtagtattgagataaaaacctgtcacacgtgtacttaattttatacaataagcaacaaggaatgtttaatgtatattgtataaaaaatttttcaggccgggagtggtggctcacacctgtaatcctagcacattgggaggcccaggcgggcggactgcctgaggttgtgagatcgagaccagcctggccaacatggcaaaacgctgcctccactagaaatacaaaaattagctgggtgtggtggtgggtgcctgtaatcccagctactcgggaggctgaggcacaagaatcgcttgaacccgggaggtggaggttgcagtgagccgagattgtgccactgcactccaacctaggcaacagagtgagactctgtctcaaaaaattaaaaaaaaaaattaattaattaattaattaaaaaaatttcaagtgtcatcgaaatcagcaacttagggtattttgtgtaactgaatattctgattaagtgggggctgccctgtatgccacttaacatgaccaatttccaaagattagatggccataattgcccttgacactaaaatcatgtgaaacacagccagtttctttgatgactcaaaacgtactttgtgatcttgccaagctttgagatcatcgttacaagcagcattttggttgtgaaaaacaactctccttatttaaccttttggggtggattctgagcaagaagttccctaggctacggtcaatctcgctgaaatacaaccacccaccgctcctttctgggtttagaaatctggttttcagaggtgggagtggcttcaagcagcgtctacctgtgttcagaaaagatgaagaaagacaggctcaggctccctgtataggagaattcaagttcattgtagtcactggtgactggttctgaaattgaggaactagtttgaggaacttcagaataaacaagaaacccaaagaactcagcttccacagaaggcttccaatgcatggaaggaggcacaggtccagctccgccctgtggcggggcaaccttgaccctggcctcatttcagatgctgccccacatgctctttgacaagctggaccaagtaaccagcttgaggacatgagtggcagaggggtccctttataatgaggggtcatattcttgtcctcccttgggaaggtaaaaaagggcttgggacatggggcatgatgaggaatattctcagaggatctcacacgattctttggtaaaagagggtaaatcatgaaacagcccacggctctctcgtcctccccgaggccagcagggcttagcgggaggagtttggattcaagtcttgtactttcactcaacagcaaatatttaatcagtggctaccatgtttcaggcaccgtgctggccagcaggaatatgaggatgaccaagagccttctctgttgaaacccttgaaaggccttcttggaatgctgaacccagttacctagaagcactgccttgatctacctgcctacaactctctagtggcaccaagcctatgggatgtgccagtgtggtcactgccctcccaattctcacttggaggggtgggaggtggtcagttatgtgtttattagctggctactcactgtctgattctactttgaactatattttcttttttgagaagaggacttgttctgtcacccaggctggaatgcagtggtacaaccatagcttactacagcctcgaactcctgagctcaagtgatcatcccacctcagcctctgaagtagctggactacaggtaagcaccaccatgcccagctaatcttttttttttttttttgacagagtcttgctctgtcgcccaggctggggtgcagtggtgcgatcatggctcattgcaacctctgcctcccaggttcaagtgattcttgtgcctcagcctcccgagtagctgggattacaagtgcccaccaacacacctggctaatttttgtatttttagtagagacgggtctcaccatgttggccaggctggtcttgacctcctggcctcaagtggtctgcctgtcttggcctcccgaagtgctgggattacaggtgtgagccactgcgcctggcaatgtccagctagtttaaaaaaattttttttttggaggtggatctcactatgttgtccaggctggtctccagttcttggcctaaaaggcaatcctcctgccttagcctcccaagtcattgggattacaggcatgagccactgtgcccaagcaacatttgagcaaatttctcctgactgtccctacgcttctgaaaatgcacttctttcccccagagtgctgaagttgcccaactgttaccaagctcccgctccaagctgacaagtggtacaagaccccagggtgagagaaataccaaggtgttcccacccaggcacctgcagaatccgagacgctctacgcctgacagtgctggctcaggctggaaaaggagggccactgggctgcgcatggtggcctcctcgctccctccagctcctatagtcatggctcctgaccagcaccggggttgacctgtgagatgtctgccttcgtgcccagcttacccctgtcttggtgaggtcctccagggcggtgcctcaattgtgtttggttttctagcacctagcagacatggcccatttgacacacttggcaaatgttcctgagtgaaaggacagacacacttctgaggaataaatgagtgccacaggctctgagagcctggctggacagggacacgtgtccacactgtccaatcacctggcaggctggaagggagggagtcacaacttggtggctgtattctaactgcaccccagcaagcaggtgtcctgaaagatggctgtggagcctctcctgccatcccctttcctaaatgctgacctagagacccaattacttctaattgcttgagaagataacccttctgaactggacaacacccatctgggctcggatttgcatatatttgcaagtatctaatacatgctagagggaggtggtgcaggactctgtccttcacattgatctatacaaagctattcctgcctctccaggcacagcatctgccagtggagactgttgggcaggactcaaggagtctggtgggtccaatcaactcccttggccaaaggagtccatcttttttttttttttttttttttttgagacggagtttcgctcttgtcgcccaggctggagtgcaatggtggatcttggctcactgcaacctccacctcccaggttcaagtgattctcctaccccagcctcccgagtagctgggattacaggcatgtgccaccatgcccagctaacttttttgtatttttagtagagatggggtttcaccatgttggccaggatggtctcaatctcttgaccttgtgatccgcccgcctcagcctcccaaagcactgggattacaggcacgagccaccgtgcccagcctccatttataatcttaactggcaaccacatcctcattggaggctggctaagcctccttttcctcccaaccctcctggctatccctagtatggaccagaaacacctaccttttaattctggcccagtaaaaggaaactttaatgtcagtagaaggtgggtggtagattttggctacaataattctttgcacttacaggggccaccatccagatatgacatcatgacatcatgcttcacccacaaggaagagcctctcactgagaggagccaggcagatcagctaggataacacccagagtatgcatgcacctcctgcacagaagaaagatgcagaagagcttcgtgcactgtgggtttggacccctgtaatcaatcattgaaagttactaaatacccactctaggtgagatactgcttggctaggtaggaaagtgccctaaaggtgtgggcaacctttgagacttcctggtaattgtattttcttatcaaccttgacctccttttgattacatgaacctcatggtataagacagcgtccaacaaatagctttctgtttactttttcttagacccagggcagcagctgctgtggctccacccttcccaggcctggcagagcttgcagaaaggctgagagtgatagggttgtggtaggggaataaaaggagaagctagtttaaaaaaaaaaatcctgcttcaggattagttccttcgttccctggcagcagagtacagtgaagagtctgggttttatagttcaggctctgccattaactagctgtgtggccttgggcaacccacttggctttcttgggccaccattttctcttctgcattttctcactgcaaaaaatgtgaatgatcatgtccaggctataatcctaacagctctttctggacagtgaggttaaggttatttagccatgccagcaggaggtgactactggttggtccagactgatggggtatgggtacaggggctgggttggtagtctgccagagacagggaacgagattatttgcaagagctgcagcttcattaaagtcaagccctccttgtagttggtcctggacattgcttatagatgtccctgaccataatcggtcaagttcaacaccaactgcactagtccagaacagtgtctgaagaaaatctctgcgttaatggacacctgatagtggctttagcagaaagagcgtcaggagaagctgtagtaaccagaacctgggagggagggatggctcaggagtaccccctgctgcttctttcttggtacaaatcctggtcctagaagtgtagacaactgagatggtggcaggcttgggattcctaaagctttctgaaatccagggtttaatctagcctttacaatcgctggagctctgcagagactccaactcaggtggctgaaaaggaggcaggtggaaaagcgttcctaaaaggtttttcacaccaaaatagggcttgtctctctgctctctgccaagggatttcccagctccccagggccaaagctcccctcctgcttctttgctgactgtcactggaagcaggccattttccaccctcagggtggctggacttaggagtcagtgacactgctgatctgggctctgtgccccgtccacgatcccccctccgctgtcagcccactggccccagaagcctcctgtttacctcctgccccctgcctccatagccctggggctgggatgaggctgatttgtggcagagggctcctcacgaaggtctgctcaggactttctctgcaactgtgctggggaataaatcgcctgtcacctacacccctgcatgggtgactcaccttccagagaaagtgctctgctcacctaagcaaagctgcttggaaaatgactaaggcacctatcaaatgcactctgtggggccaaccagttatggagcaaggtccaggcacactctgcctctcacctccagcctgaagtcaagtgcagagctgccacgccaggcctgctggtttcattttcatctgaaccgagctccacatgaggcttgacatccggtgatctattttttctaaaaactagcttcactttagaaatgactcttcggccatcaagtcagcttccccaagagaaaacaaaatgttatttaaagggaacagtagcctggtgagagcctatatttttgttttgtattaaggtgaaaaaagactttaaaatataacatgaaactttttttttcccttgtgagattaaaacaaacgtttttctttcaagagatggggtctcgctatgttgcccatagctacttgacctcctgggctcaagtgatcctcccgcctcagcctctcaagtagctgggactaaagaaacacacgtcaccattccaggcttcttgtgagatttaaaggggaatctgcaagtccttgactgcagatcgtgggcccccagacagagtctcagagagaagctgacaaagacatctttacgagggggaaagggtggtgagctggggatgccatgtggtagtgggaacctcatcccacagaaccaaatgttccctcctgttcccccaaagaacaagtccttgctgatctacatgccatacagtattttccctttcctcacctccaggattaatgcaggaacctacttgatcacgtgtgggacacaggaagcccctagacaggcctagctgtgtctccagctcagagttaggattgtcaactgggcagagcctggacctttgtagcctcatttggagtatggtgagggcagtatatagtgtaagacagggagaacccgagagctgaagcttttagactgaaggactgtccccctaaaggtcctactgagaaaatgactctggcctgtcaggcagtctgacccttcttgacatcatcttacagaaaacaggtttagtcacaatgcagtaattggcaactactactgctactattactactactactactactactattactaccaccaccaaacaccaccaacaagaacaacaacaacaacaacaacagttacagcctctatgttctgtgctgggcactgggctcagcactttacatatctcctctcattttctactcaaaacagccccatgaagtatttctgatcccattcacagatgaggcacctgatgattagagaagtgaagtgatttgcttgcgggcacacaggcaggccgtggcagacctcgacctgacccaggtctctctgacctgacagcctcagccaccacatgtgacacggagacaccaaggacttgttctgttgctctggacaaatcacgggctctctgcctttgtttctacatctggaaaatgggcacaagcacacctgtccaggcagcaggctattcatcttttggccttttattaattaaaaatcaatatcaattaataattgattggtacaataaataaataaagctgctaccctggtttcgttatgttcaaaattgacatgtttgggggaagaaaatccttatcgtttcatgagcaaggtagtagaaaaagcagtgacctagatatcaagaaaagggggtttagattctgagcaatcctgtctgtttctccttatgaggcttcacttttctgatctttgtccctgcccttcttcacatgagtatggtgtgaaaatacaaagactggccataaaattattcttgatgccacataatttcaagggatttctatcagggagctgagggattaagacatgtagaaaagcaagaagggaagaggctcctttaaactagaatacaaagagcacaccggccactgaagaaaaatgactttttctgcattgtcattcaggcagtcataagcccagaacaaaaaaatctcatacttcaatgtcctgctcagctcaacagaaatgctcccctacaatttgccctacgtctggccttccctttttgggctactactttcagcattttagccagcatcaccgagtaaatgcaaaaccttcacacatgcatcactttgaatgcccacccagctcttgcagatgctcagccccattctgttcccttactagggaatcctggtgtgtggagaccagaggggctgacatccttagagctccctaaatccactgacatggaattgtccccggcccaccaatttcacactggtgccatcaatagtgcccataatgctcagatgtttccagtttaactgaaatactaaaatggggcaaacaggaagcatcagacacaactgtggtagtgacttattaatcacgaaagcagaattttagttgcattttaaccttttgccaggaaaaaaaaaaaaacaaccttgagatgatggaagccattagtagaagtacgctgcctttatgcgtattgggctgacttagactttttacttaggactgactttgcttttaagatttctgaactttccccccagaaagaacatctgtcaaaccaaccaatatgaatctgtcagctcttcatcgaggcaggcaggcttgttaggaaagcccatgtgctgtccattgagacaggaaaaaaaataggaagttaaaagtgccttcacaggccaaagtgatacaacactgttcagagggtgccaacaacgaagaaaacaaccctggataaagctttcatctctttcacatctccgcagatctctcaccagaccctagccagggatgaactgttatcaatcaccaaaaaaaaaaaaaaaatcacaacagttgccgagggctggacaaccaatcagcgcaagccatcttctcagcagtaaatgatatacacatattccaggcagatcacaaaggagtcagtgttcaacaggagaaccaaaatgaggaaccaaaccttcatctgttgaggcgaaacagcccaaccagacatttttgtttaatagagggagactgatttggcagggtctctgtggtgccgctcccacaaactcttaacagacaataccaatgacaaaaaacccccttcagaactgcttcttataatcagaaaacactcagaagatggcctgaagcttggcagcgtcttgctgtctgatttcacaaagagctggtacacatacctgggtacttatctctaaaattagagtcagagacgattacttttattttgagatcttctgagaagttctccacacccttcaaaataaataaggatgtccgaaaggtgtctgaaaaattcagaggtctggcatcgctccaaagaaactgattgatatcacttaaaaaacaccaagagtaaatccaaacacaaccaaagtaaggcaagcactttttaagtgtcctctcacattaagagcataaaaaccacaccaaaaacttctccctcctttctgcatctcagttctataatgtggtcctgatctaggattctgggaaagacccatccttagtcccagctatgaggcatcaggcaagatatataccacccccactccctcatacacacctgcctcaggtgcctcgcccataaaacaagacactacaatctgtcttaccacacagccatctgaaggaaaacggagctcacaggtatgaagacactaagcaaaaaacacatcactaatgttaagatactgtctccttctaatctttcagaaagaccatgtttctagtcaaggggtttccaacatttttcttggaataaactccagactcctattttatatcatgacctcactctaatcatttaatttcatgtgcttttaaagtccttaattaagtcattggtgttcattgtctccagcgatcaaaagtagttttaccatttactttgctgatgtatgtaccttttcaccacttatcctctccctcattcatacctccagtccaccctttagggccgagagcaactttttaacctcgactaggaaggaaacactttttctgaagctacccagcactaaggaggctcccgggcaggtgggaaacgtacgtacaagtggcccctctctgcctggtgcccagtggctgcaagatgccagggccacgatgggtttccaagatgggaatgttatatttgaaccgacagataaagtcccgagttggagagcccagaagaattacagaggaggactggggtccgagggcggagggaggatgctgcgggcggccagcactgccccgctgcatgctgaggacaggcttagctcctgctccccgccttgaggtgtgacctgagaacttcccatgaaaggccgggagggtttcacgccagggcagatgccagggcgcactcctgcaggagacacgtccgccccgcggcaggcgagctccatcctgggggcactggggcgcagagcaggcgggcgggcctggcggcggcgcggggcactagtgaaggggaagcaggcggcccctgcgcgcgctcggagccagcgtgtggccagcaggagtgcgcggcctggaggcccggggcgagcgcggcaccggcagcgcgtgcgagggcgcgcccgcggaccgctgcgagtgggttggacggggtacgtcggactgcgctggcctggccgccgaccccactgctccggggcgaggggccaggccgcagcccagcccggggctgagaggcgatccatcccagccgctccctggtcgcctcgcaccgggccccagggtcccgccccgtcacctaccggccaagcgccgatctccccaaccaagcgagtgttgcgctccgctcgcccgcgatctcccgccgccggccgccgaccgctgagctcccggcccgtggtcgccccgccccggtcccgggctccgccccctcgccttctcggccgcccccggggccacgcctcccccggaggctgtaactttgcctcgcttcgcgcctcctttctttggccgcaccgcgacccgtggccccgcccactcccctacgccaaccaatgagacggtcgtcccggcaagcccgtcttcccgctccctagcaacgattggttaacgaggcctggtttccagaaatgggcactatttccggacgatgtttgtagaagggagatcgctgggcgggcggactgacagaaggcggaggcgactagggtgttggtggaaccacacatgcgccctcggcttctggcagtcttaccagctgcgttctcgaggttacgggaaggaagggcgagtgtgcgcatgcgtgggcactccctgccactgacttcggttaccttggagacagcgaggcgctctccctcgtgggtcgcgcgcgttccgcttcctctctgctgccaagcggtggcggctgaggcgggaggtggtgggggtagagacgtttttattgagctcttaccgtgtgcctggtcctgtagaatccctggaatgagtaaagaaggttacagtgcctgccctcgagaagcttggggagccaagggcttacaggggcccgacctgtgggttgaaacccaggtacaaagagagcatgtgggtgcgtggcgtggtacgagcgctgagcaaagcatctgctctctgggtttgcagaccacagagccagcaagaggatgagagcttgatgtatgcaaagaaaggacctggagttcagaatatgcattgaagtgtcaacagtgcttctttctgaatgggggtcgggggtggggagtagggaaggtatagaaactttttctaacttttgcccctctgtattatctagtgtttccacactgagcttgtattttatttgtaataaattccaggccaggcacggtggctcactcctgtaatcccagcgcttttgggaggcaaaggcaggaggatcgcttgaggccaggagttggagaacatcctgggcaatatagcaaggacctcgtccttgcaaaaaaataaaagaatagccaggcgtggtagtttgcacttgcagtcccagctagaggggaggctgagagtctgaggttacagtgagccatgatcgtgccactgcactccagcctgggtaacagagtgaggcagtcctttaaaaaaaaaatccaaacttttttttttattgcaaaataaaagatgtactcctaccctgggcatcccacttccatgaagggtccatggtaggtgtggtgagtggctctagtccggggataggcaggccccacccaaggctgtcttgaaaagtaaggaacaccccatctctggaagtgtttgagcaaagaccaccatctgcttgagactactttgcagacagtccgaagctgaactcttctttctggatatctgtgccaaacagtcatctctgctggggaatagggaagaccatttatttaggcagtggtcaaaaactcacaacctgagggcctcattcactcacccaggccagaaatatgctttgtttggctggcccaatatttttttaaatttgaatttgaatgccttagagcagagcctgcggttccttacagttcccgccacccaaccatctaaccttatgtcacctgtctggcccctggagcatttgaggttgtggctcccgtagagtccgtgctttagagccaaacagtctctggcgcccaccctggctctgccactgactagctgggagatggcagacaagaaagaagctggactggtggcccccaaatctctttccacccctagggttttgcatttcagtgactcagggaaaggcagagcttggccagatgtacaggttggtatcggcaatcttggatgcccttattgcctctcccaccacctgtttgcctctgggcacaccacttctcaggaaagatgtgggcacacctccagagtctgcagacactccctggcttgcctttgccttctctctctttcactattccttctttaaaacacccagtgtctctgtactttgcccaggttcccttgacacctctggtcctgggtcccctgtacactcccacctaccccatcaagatgatctgtctttaagtccgtccctgaacattaatgtgtattaatcagagacagtgaactgtgttgactcaaaactgtaactctggagaaggaatgtcacatcaggttgcaggggaggagcaaaccactaaacactggtaaggaagatattcgggataagcaaggcctctccgtttcagctacttttctgaggtctttccaagccccactgtgtgtgggtgaggtgagaaacaatacacctacccagagtgagcagtgtggtgtctctgagtcttgaaatgcttgcaccctctggaaggagagcttcgggacgagattacttcctccaagcttaagtcaagacaacctgggaaagcttctggccttgagtcacttgtgcagcctcagctctgctttaaatacaagaaattgacatttacaggatgactcacacctggagcagtgaactaggttctcagtactcaagggttctcacaccccatccatttcaggtctggaaatagcgttaagactgtgctattccgaaagaatcgcagcttgttttctgatactttacaaaaagtaagccagatagacttagagtacttcatgtgcataacctcactgaatgttccctctaggccagggtttctcagcctggcactatagacatttggggttggataattcattgttgggggacggggcttgtattcgcctgttttcacgctgctgataaagacatagctgagatggggtaatttataaaggaaagaggtgtaatggagtcacagttccatgtggctggggaggcctcacaatcatggcagaaggcaaaaggcatgtcttacatgacagcagacaagagagaatgatgagagccaagtgaaggggaaacccttacaaaaacatcagatttcatgagacttacgcactaccatgagaacagtatgggagaaactgctccagtgattcaattatctcccactgggtcccttgcacaacacggaattgtgggagctacaagatgagattttttttttttttttttttttttgagatggagtctccctgtgtcacccaggctggagtgcagtggcgcgacctcagctcactgcatcctcctcctcttgggttcaagtgattctcgtgcctcagcctcctgagtagctgggactataggtgtgcaccaccatgcccggctaatttttatatttttagtagagatggggttttgctacgtcagccaggcaggtcttgaactcaagtgatccacccacctcaacctcccaaagtgctggaattataggcatgagccactgcgcctggcctcaatgtgagatttgggtggggccacagccaaaccacatcagggctgtcttgtgcattgcaggatgtttaaaagctttcctggcctctgtctactacatacctatagcactccctcatccacccaatgtgacaataaatgtctctggacattgctagatgtcaccaaggaagcaaaattgcccccggttgaaaacccctacagtctgaccccattgaataggtagtattactgtccccatttcactgatgagcaaactgaagctcagacagaagtaactttcccagtgtcactttgctgtaacaggagacccaggattcaaaccatgtctgacttcagagcccctgccctcctgcatgccggactctgcagagagacttcagggttcagggagccaattgcccatcagttctctaggacagtgctgaagagtgagtaaatcagtgaaggaatgctatccttggatcatttttccttttctgtttgccttggaagaaaggaaattatattctggtttttattgccttagtcagcatggtttatggtgctgagccatgtccagtgagaaagtggctgatgagtcatctgaatgtggatttcaggccccaaattactgtgagattctgaagttacacttgagaattcagatgtgaggctgagataagagatgactggggactgtagggtggatgttcctggaggagagcagttttcctttccctgtcgggactgcctgaagttgcagccacagtgctgttgctgccctccccagcttggacctgccctactgctgctgttagctgaggtctatggagaggccagggaggcaggaggggaaatggataaatggatgcaggcaaagtgtgatccattctctctagctattttgtgatcagtgatctcatattggtagcttgaaattggacatgttgggagtatttataccatggaagttggcaaacagtataaatcagggctacccatcctgagttggttgttaaacacctgctggcacaccactgtgtgctggttctggcctgtgcctgctgcccaccaaaccaaccccacatagggagatggcagggggcaccacaaaccacagagctgctgtagaagaggaggggccatggcgatgtgggtgagggggagaggagtgccaatttcagcaaagaatggaggtgagggctggtaggggactctggagggtactgggcaaagatgaccttacaagaacaggtcctgggcacaccttccagagatctagcctcctctcccaactttggagccttcttagggtgccctggcttgacacaaattcttctcatttcctgatttggagattttcccctccagactcacctgcttacctctagtctcctctccacactatcctcaagccttctggtgaattgaatcttcctaagagatcgcataggtcctgtcattccactcccaatgtcccagcatctcctgcccttcgatatctccctcctttcgcttcttcctttcaacctacaaatgaggtcaagccgaggacaccctaaaaacaacaaacaaacaaaaccttgctagttctggctttcccctgcactgttagcccagccttctttcccccttcactcccaaacttcttgaaagtctgcttcatctcccacccaagtgggctccttacagcctggtttctgctcaccagcccttctctccatgaactgcctcctagtagatgaccttgtctcagtttcttatctgcagccagccacaaatgtgatgcactgagctcctctgtgtcaggctctgggtaggaagcatggaacctccagaccagtccctgcccttagggagcttccttgaacaggtagcaacagatgaggacttaagccactgcaagtgtggcaagaagatggggagactgtatcatgtcaggtaggatccagccaggaaaacaggacccattttgagggtttttttttttttaattttgatagaggtaggggtctccctgtgttgcccaggctgatcttgatctcctggcctcaaacgattctcccgccttggcctcccaaagcactgggattacaggcatgagcctctaagcccagcctcattctgaatttttatttttattttatttatttatttatttttgagatgaagtctcactctgtcacccacgctggagtgcagtggcatgatcttgactcactgcaacctccacctcccgggttcaagcaattctcctgtctcagcctcctgagtagctgggattacaggcgcctgccaccacactcggctaattcttttgtatttttagtagagacggggtttcaccatgttggccaggctggtcttgaactcttgacctcaggtgatccacccgcctcggcctcccgaagtgctgggattataggtgtgagccacctcgcctggcctctgagtttttaaacagaataaacatagaattgaatgcaggaaattggttacataggggatgaaaggatggagaagttcttcagacaatgggggaagtaaccaggaatccagctgcgacccctgggttggagggactggactggggcagtgtaatcaaaggctgggactggggtcacttggaagaagttgaaaccatagagaagacacaaccacttccacagataccactaagactgagagggatggggagaaatccctgcattctccttcccttctacctttgggtttcctgccagagcctcttactggcctgggagcctagaggggtcagtcacttgcaatgcagagcagagcaggtgagggctggatgggggagcacacagcccgggaccagcgcagggattccttctaccctccacatctatcgttaccatgtccatctcccctgttgaggccaggcctcatgactcattcatctctctccggcaccagggcctagtcaagtgcctggcaccaaataggtgctcaactactgtttgttgaatgattcaatacagccagtagtggatgaggactccaagggagagagtgtagagaaatgaggggcttaggcctgaaacttggagggtctcaattgttaagaattggagagggaggccaggtgcagtggctcatgcctgtaatcccaacactttgggaggccaaggcgggcagatcacttgaggtcaggagtttgggatcagcctggccaacatggagaaaccccgtctctactaaaaatacaaaaattagccaggcgtggtggctgacgtgtgtaatcccagctactcaggaggctgaggcaggagaatcgcttgacctgggaggtggaggttgaggctgcagaggttgggagccgcaggagaagagaggattctggaagaagaagaggagcgccagctttggacatagtgtatctgggctgccctggctctctcaattgtcctctctttgctgttgactgccagattaacaccttcagttctgaccgtgatcctgggctccaaaccagagtttccaggggcccatagagtatttccaccttctagccatctggcatctccagctttgcactgttccccaaacctgttccttggccacccctctctgttaatgacctcaccgccaaccccgggagtctccatcacccgcctcttcttgctgtctcatgccaagccatgttgatgctctctccattatacctctgtctgtggcttccctttgtctcccctttctgatgatgcccttgtagtatgtcagcctttcctcttgcttcctgtcatttatattccaatccctcctacactgtctgtcactcccttgcccaaaactttcaatggctccccattgcctactgatgaagtacaagcttgttatctggctcacaagggcctcacagtctagccccaactcacctcttttggtcttacttttcacagcttccctgtgggcaccctctgtactacttaccattgacccaaaccacctgtctgtacatcctgacccaaggctgccctgtggactgaaatgcacccctctgcctctgcctgtcaaatcatacccatccatcaagttcctgatgaaacgcctcctctccaagcaccacttagcccagctatgtatctgcctactttatctctcttaacagacagtatgcaccttgatggcagcttgtaatcaccaaatggtgagttggtatttggtaaatgtatgttgacctgaagtggctccaaaaccattcttcagatcaagaacctcctgtgggctgggcacagtggttcacccctgtaatcccagcactttgggaggctgaggcgggcagatcacttgaggtcaggagttcgagaccagtctggccaacatggtgaaaccccatctctgctaaaaatacaaaaattagccaggcgtggtggtgggcgcctgtaatcctagctacctgggaggctgaggcgggagaattgcttgaacctgggaggcagaggttgcagtgagccaagatcgtgccactgcactccagcctgggtgacagagcaagactctgtctcaaaaaataaaaaatacaaatagaaccttctgtggctccttgttgaccacttcagaagcctgttccatcttagtatctaaccttactcccccactgttgcctccaaatatgtctcatgttcagtttcaacccttcagtagaagcgtgaaagatataaacatgaaaaaaggcattactgccctccagaagtatgcattctcctagggtggattagccatgcatactaacagctaatagaattggtttaaaataatatcttagctgggtgcagtggcttatgcctgtaatcccagcactttgggcggccgaggcaggtggatcacttgaggtccagagttggagaccagcctggccaacatggtgaaaccccgtctctactaaaaatacaaaattagctgggcgtggtggcatgcacctgtaatcccagctgcttgggaggctgaggcaggagaatcgcttgaacccgggaggcggaggttgcagtgagccaagatcgtgccattgcactccagcccgggcgacagagaaagactccatctcaaaaaaaataaaataaaacaataaaataacataatatcttttgctcagagggggatatccaatctctccttttttgattggaacccggattttattcatagtggtgacctgcccagtgtgaaatgcttccccgactctcttacagctagggtggttatttgatgtaattctggccagtgagatgtacatggaagtctctggatggagcttctgggaaagctgggggacagacctagctggcacaagcccttttgtctgttgcccttggccttatcccctttctttagtttggaatgcacacccagtgcttggaggtgtagcagccagtgtttgagcataagaattctacgatggcagagcagaaagctaggctctgagtccccaatagactcatggaaccgtcatgcagccagggactgcccacctcctggggactgctgaccttcagcttctggcatgtgatgaagccactgcagctgggtttctgtgacatgcaatactgactggtacagttaagagttgtaaaatttagccagcttgagaattcccaacagcgaaaagtagccccaggatgaaattacactgcggcaaaagccttaaatgtaataagctggccaggtgcagtggctcacacctgtaatcccagcactttgggaggccgaggcgggcggatcacgaggtcaagagatcgagaccatcctggccaacatgttgaaacaccgtctctactaaaaatacaaaaattagctgggtatggtggcgcatgcctgtaatcctagctactcgggaggctgaggcaggagaatcgcttgaacccgggagatggaggttgcagtgagccgagatcacaagctactacactccagcctgggcgacagagtgagactccatctcaaaaaaaaaaatgtaataagcttatgctcattagggattgtgtaacacatggaaacagtaaagaaggtctgtagcctacatgagtagagagagctactcctgttttctgagaaagggaatctcacctgggaaagctgtggaaggagatgagtgacttcatgggctagagaggatgccggaaatgtcagtcaaggattacgtgactccttgtgctaatcacaagaagtcttgatcaggaccaagatatatttcacccgattcagataaaggatgctcaaattaggtagagggaaaacccaggtgttaagatgcagagattagagcagatgtctgtctgtagagacaagaatgctttcacgcaatccgtgccatctggacagagctttactataaatcacagttccccaaagggaggcatgtggttcccgaggggtgcactagatgatgtgtggtggcccacagctctaagaaacattggatctcatgctgagctagttattctctaattcttttttagatttgtctatttcttgaataattgatgcatgcggtttgtacaaattccaaaagagcatgcttctcccacctctggccccaggctctttttttctttttcttttcttttcttttcttttttttttttttttgagatggagtcttgctctgttgcccaggctggagtgcagtggctcagtcttggctcactgcaacctctgcctcccgggttcaagtgcttctcctgcctcagcctcccaagtagctgagattacaggcatccaccaccaggcccagctaatttttgtatttttagtagagatggggtttcaccgtgttggccatgctggtcttgaactcctgacttctggtgatccgcccatctcggcctcccagagtgctgggattacaggcatgagccactgtgcttggcccccaggctcttttgaagcaaccattctcccatccaggtaccaaccaggcctgaccctgcttagcttccaagatcagatgagatcgggcgtgttcagggtggtatggcagtagacgaagcaatcattcttaccagttccttgtgtatttttccagatgtacttcagcatgtgcaaacgatacattcctatagcctctttctaaaaagttaatggaagcatactatccacaactgccctgtaccttgcctatctcacttatcagtgggttccacatcatacatatagaactgcctccttcttttataaagactcatgctattcaactgtatgactggtatataatttacccagttcactgttgatagacttgtttccaaccatttccaaccattataagaattgttgcaataaatatccttatatgtatttcattttgcatattagttaatccatgcgttccacaaatattttccgaacacctactatgcaccaggtcaggtctaggcaccagaggcagagcagtgaacacaatagatggagtccctgcatcatggagctgccattctgtagtggagaatagccataggattaactactagaagtgggtcacactttcaattcttctaattaagtcaagtagaaagtctcactttggtgccaatgtgtcttttttttttttttttttttttttttttgagactgagtctcgctctgttgtccaggctggagtgcagtggtgcaatctcggctcactacaacctccaccttcccgggttcaagtgattttcctgcctctgcctcccgagtagctgggattacaggtgtgtgtgccaccaagcccagctaatttttgtatttttggtagagatggggtttcaccattttggacaggctggtctcgaactcctgacctcaagtgatccaccggcctcggcctcccaaagtactgggattacaggcatgagccaccgcacctcgctgagtgccgatatgtctttaatgtatctctctctgacacttgtaaatttctttaagacagaaagtgctggccttaggtttagagtgtatgacagaccacagagcctagctagagttgaataacaatgtttggttgttactggatttatttctatatagcaaatgttattgattttccatctatagtcaaaatatgaaggttccctttaaaatacgcaggttcctttcaaaataattttttaaacttattttttattttattttatttttttgaggcaaggtctctctctgtcacccaagctggagtgcagtggcaccatcatgcctcactgcagcctcaacttcctgggctcaaacaatcctcccatctcagcctcccaagtagctgggactacaggcatgcaccaccatgcctggctaattttgtttattttttgtagagacagggtctcactatgttgcccaggctggtctccaacaactggattcaagcaatcctcccacctcagcctcccaaagtgctgggattacaggcatgaaccaccgtgcccagcctcaaaataatttaagtaaaaaaaaaatgagtcaatatagagaagaatgttaagtaaattaataacataggtggaattcagatgtggaaaaaacccacaaaggtgatagtcaaatgagtgaggttaggaaatcatcaaattaaacaaagcaaggagaaaaggctaggcttattatattgtattttatgtttatttttgtatcttcactcatctttcatgttgaaacattctcacctccataattcttcctaggcagctgatttgcttatcatttattattgtttactacttatttggtgattcttatacttagatttcctggagttcctggtcatgaaaattttgctttgtgggttttttttttttttttttgagatggagtctcgctctgccaccaggctggagtgcagtggcgtgatctcggctcaccacaacctctgtctcccaggttcaagtgattctcctgcctgagactcccgagtagctgggattacaggtgcatgccaccaagccttgctaatttttgtatttttagtagagatggggtttcgccatgttgaccaggctagtctcgaactcctaaccttgtgatccgtccgccttgggctcccaaagtgttgggattacaggcgtgagccaccgcgccgggcgctttgttttgctttcatgaactgtcaccaatttgcattctcttagaagatctctttcactttgaatcccccaaaggccccgctctctttgtcattgctggctctggagggggttggagatgctcctgctggggaccttgatgcaacacccttagtcagattttcgtaatctggctgaggcttgccctgtaattctctaaaaatataatatgatgaaacaaccaagaccaagtaagccttcgaggagatctcaaagccagaagcttctgaacagtgcccataaccacaagtggggctgtaatcacccacaacttgttagctaaagacacaaacaattagcttggtggttggaaaggtaaacaaggggcatttcacaaatgtgttctttaggtcaagtaggtggtagtaagtctctagctgtggttgttggctttctctgcggcacaggtcggagagtgggtgatacctctgggccctgggcagagtacatttgaggtgggcagtaagagggaccgcagctgaatggagagggagtaggtgggagcacgcagggctccaaggcaactgaaggagcacctgggagcctgagaaataagagacaacaaaaagtaaggccatccattagagggcaagtccttgagttttgaaatctagtggagctctcaattaatgactgaggacctaccatgtaccaggccctgacttaaacttttttttttttttttgagatggaatctcgctccgttgcccagcctggagtgctgtggcacagtcttggctcactgcaacctccgcctcttgggttcaagcgattctcctgcctcaggcttccgagtagctgggattacaggcacctgccacaatgcccagctaattttttgtatttttagtagaggtggggtttcaccatgttggccaggctggtcttgaactcctgacctcatgatctgcccgcctcagcctcccaaagggctgggattacaggcatgagccaccttgcccggcctgacttaaacatttttataagtaccagctcagcggttctcaagctttttggcttgttcataaatttttttgaggactccaaagagcttttgtttttatagatgatatccgatggtgtgatggtacatgtttaacaattggttctctgctgaaaagtcctaatttgtagcacttaccaatttccatagtgtaaatacttccaccatggccaatttctttttctttctttcttttttgtttttgtttttttttttttttgagacggaatcttgttctgttgcccaggctggagtgcagtggtgcaatcttggctcactgcaacctctgcctcccgggttcaagagattctcctgcctcaggcttctgagtagctggaactacaggcatcttgaaccccagacctcaggtgatccacccgcctcggcctcccaaagtgctgggattacaggcgtgagccaccgtgcctggcccaccgtggccgatttcaagataccaacctaacatcactgaatgtgaaatgggaagagatatgtacagtcaactttcccaagccagtgcaagcagactgtgcaccgctggaatttttattgatatttacagtactggaaattaaaactcataaatttaaaaaaatgccttcactaaaaatactaataacccattacatatgaatataaacattctttttgaaaataactatttagaaaaataaaaaataattactgaagacagtggcattgttttatattttgcaaatccctttaatctagcttaatggaagacagcggcattcatagatctccattcaatcagttgtgatgtcctatatcacgtggtctttggaaaactccacaaaagagcactaaaggtaaataatgtcttagcattactatggaaatagttttgacctcatggaccccctgaaagagtcctggggacttccagggggtcccaggaccatactttgagaatagctgtactaatgcatttactttttccaaggagcccagtgaggcaggttttcttatatccccattttgcaaatgaggaaattgaggtacagagtacttacccaagggcactaagctagaaattggcaaagtcagccagacatggtgcctcgcacctgttatcccaacactttgggaggccaaggcgagaggattgcttgagcccaggagttcaagaccagcctgggcaatagagtgagacctcgtctctgcaaaaaatttaaaataaaataaatcaaaaaagaaaatggtggctgggcatggtggttcacgcctgtaatcccagcactttggaaggctgagatgggtggatcacttgaggccaggagttcaataccagcctgggcaacatggtgaaaccctgtctctactaataatacaaaaattagccaggctcggtggtgcgtgcctgtaatcacagctacttgggaggctgaggtgggagaatctcttgaacctgggaggggaaggttgcagtgaaccaagatgacaccattgcactccagcctgggtgactctgtctcaaaaaaaaataaaaagaaaagaaaatggcaaagtcaagattccaacccagtcagtctatacagatgggcagttgagttggtgactatcacttattagatatgtgatcttggtgataattaacctctctgagcctgaggtactgtcatttgaccaacccattgtcatcccctaggttaggcaggactcgactttctcccttgtacccagctctcactgatggggcatcatctgtgctcccttagaaccttctttttttctctgctcacctgacactttatcccacactacatggcattaattgtctccatcagactgtgtgcaccccatgaggacagacaccacatctatcttgattacatttgtgccatcagtgtctgcagcaggtcttcaaacgtctttgctgaagaaataagtgaagaaataaatggatagacattttgcaagaaggcaggacacagtccatcctacctagggctcttctctgtggctcgagggagaggagtggcagtgggggagtggaaaggggataaagtgatcctgctcccaaatggcacttacatacacttgcccaagcctgctgcgtcatcctaattacgggacaaattcttgcctggagtctcctccactcaatgttcccattacttggcactcagacgcttgagttagcagcccctccaggtataccttcattcttctagaaacttctgtatcctctgtgcactagaggtccacgtagtacatatagagctgccttattccttgcaaagactgcatactaccccattgtataattggcatataatttgcagatggcgggctctgctttttcccttcatatcctgggctatgtgatgagttactggcatccacccccactacccttttgtaaggcagttaaatctttttatgtcatcacctacagaaagggtccagggacaaaagagtggcccacaccacttggggcccaattaatgactacacttgtggaggctggggactctggcaggtgggagcggttagatagaggctctccttagggcctcgcagcttcctcttttgctatctatacggtcctttccagcggtgaccttctaggagtctcagaagccccaagaagggagaagtgtaattgtgggggagggagggagcagtgcagagacaaccagccagggttctgcctggaaggtcagggggctgagctctggcaccagagacctttaagaagcaaaaaggaactgagaaagcagccaggagtctgctcagcctggagttcctggaattctgctttgtgggtgagcttcctgtggcagccaaggccccttctgactaacaggagatgagaatgggaggtgaggagggtgggtagagaggtggctgggcctgccagctctcctgggcactgccagctccccaaactggctccagatttcctccaggaactgagctgagattcctgggaatctcacccacttgggtgacttgctgcctgcctgctgagcagaggttgggcaagtctacaagtcaggttctcttcccacccagcatcaagctgtctgcccacttggtctggagtaggcaacaaaaccaaggccatgatctctggaaagccatctctaaaacatgaactttacataggagggaacaactggccccacagccatttttattaatatgattaggtggttgccaccttggaaagcactgtgagcctggcctgggctgcaggactgatgaatttcagtagaagggaggagaagaaggaatcaggagcaggaggcgggagccagggaacaccagcaggggtgggattcttaccgacttggggttggaaccactcctgaggttgcagacaaatccagggatcccatttcctccctccacccactgtcagtgcaggtgaaatcttgctaaaataaaaatcaagggtagccttggcatactgttgacttctcatactatgtcataattgttgttcgcacacgtgcctccccttctaaactgtgaggttctggaggatggaggcctgggttggattcacctctggacaccagcctcctgcactgggcttggcacatggaaagggctcaatagatattacatgaatgagtgaaggagcctgactgagccctccccatatgccaggcccaccaagggggagctacaagcaagggcagttgattgggatggaggtgtggacgcacctgtctggcagctgcttgctttgttttcactgcttatagcttcctcctcctcctcctctccctggagctgccctggtctctaaatgcttagataaggtggtttattcatccattcaacaaatgtttattgagcacctgctgtgacaggccctgggttctgcatgattgggaatgaaacctacacatttcctgcctcctccagctcctagtctagtgtcattaaataagtaattacagtgagtagtaacaaacactgtgacttggtaggtctcatagagctagggtgatggtataacttgttatcctaactgggacaccttttgggagtaaaagtgatggttgccggttgagttccccaggaagcagattctgaaatggagattagtgtgcagaaagttgattaggaggccgtgaggatcaacacctgtgaaaaggaagggaccaaagcaagattgagcagagggagatgttgggatgtgatggagtctcaacgaaggcctcagccaatcccacagggcaccttcggctgagatggcccttcagcttcatctccagttggagtgaggaggcctggccttcataccattatgttgataagtcactggatactggctacctctggaaggaggtatgaccttgggcgaggctgttctcagttgagacagtcttcaaagaaggctgacagctgaaggcatcttcccattgccaatagccaaggatttgggtggcacttcccagcatctgccacagaagcactgttgataattatgtccagataataggcgtttgcagggctggcccaagtacccacagcaagagcacctggctgggagtttcagctgggatcctgcacaaatgtggtgtggcagaaagctcccagcaataggaacaagcccggggcttgctcaacctgcattctcttcatggctatctctcctttctctcacctgtttcctttcctttttttttttttttttagacaggttctcgctctgttgcccaggctggagtgcagtggtgccatcatggctcgctgcagcctcaaactcctgagttcaagggatcctcccacctcagcctcccgagtagctgggactacaggtgtgtatcaccatgcccagctagttttttgatttttttgtagaggcggggtctcactatgttgcccaggctggtctcaaactcctgggctcaagtgatcttcctgcctcagcttcccaaagtgctgggattataggtgtgcaccaccatgcctggcttctttgctttatagaaccagtcatggctgtcacatgctacatcacctacttcgtatcattctatcactcattttccatgcattctattctttaatttgtggtgaggtgggtgtcattattattctcaccccatggatccaaactatcaggcagtcctttccctattacttccaaaacagagcccaaccattccctttctctgtcttcaacacctccgtcttggtgcaaaccaccaccatctctcccctaactgctgacattgttttgattttgagcccaggtagccaacagcatggatctgctgagaaggcagatgacagcagtaaaacaacagcagaaacagaccacggacagaggcccaggtagagcacgtacactgagaaaactccaggaaagccaaaagcatggtatctgaaccgagagataagcacatgagctgaaagctcaggatattccctcttcagaacaaaattgagagcaggggagcacaggggttaacagcatggcttctgggccagaacgcctgggtttctgtaaccttggaccagcttcttgatgtctctatgcctcagtttccttgtctgtaaaacaggggtgatgataatagaaccatcataaggggttttaggtgaagtaatcagtcaccatgggtaaggtatttagagcagtgctctgccagggttagctgcaggtattaccctgggagctaccatcttggtccacattcagtgtggccaatgtggctgttagcactccttgtctgctcccatctccaacaccttacccccatgtggagtcatttattcattcaacaagtatttcttgagcgcctactcacgtatcaggcattgaactcttgtgttattttcctatatcccaaaagtcactgagctgaagggcaggctgacctaggcttgctttctgctgcacaggggaggctccattccccatcatttcttgttcatgctcaaggtcatccagatgaaaagccagcttctgtgtggctcagctgcctattgttctcccttttggatctctgtctgctgggtctgagtccttgggcttagagtgagcatgagaatgacccttaggccctgctttcagaccccagagggctcagcgggaaaggaggctgagcggtttacttgggccctttgcagggtggggccctgccctgtctcgtgggtgcctcctccacatggatcctcccttggccatggcctcgtgtactcctggcctgagtctcctttttctgggtggccgctctccatctcaggaaagggcctggaagggatgagggaggagttcacaggagagagaagagggcagaggcaagtggaagaaaagagagaggccaagtcaggcaagaggggttgagagggaggaggaggagaggatgctgatgatgacatctgacatgattgattaatgcatgccttaattcctaggaggtcagagctgttattatccccactctacggtggaggctgaggcaaagtgggctatgaaacttgcccaaagccttggagctggtaactggcagagctagaatttgaacttgaatagtttgactccgccaccccagaagggtgcagaattctcaaaagacatcccaaggtgtgcaatgaatcgtgttgaatggacggtgggttgtgtgtgtgtgtgtgtgtgtgtatgtgtgtgtgtgtgtgtgtgttgggggggcggggggaggctgaaggctgtgagttggctctttttttttcttaagagtcagtgtcatggctgggcatggtggctcacgcctgtaatcccagcactttgagaagccaaggcaggcagatcacttgaggtcaggagtttgaaaccagcctggccaacatggtgaaaccccgtctctactaaaataaaaaaattagccgggtgtggtagcgcaggcctgtagtcccagctactcgggaggctgaggcaggagaatcacttgaacctgggaggcagaggttgcagtgagccgagattgtaccactgcactccagcagcctgggcgacagagtgagactccgtttaaaaaaataaaataaaataaaataaaaaagagtcacggtcttgctctgtcacccaggcgggagtgtagtggtgtgatcatagctcactgcagccttgaactcctggcctcaagtgatcctcccacctcagcctccccagttgctgggattacagatgtaatccctggtgtcttttggccctgtctggtgaagcgtcttatcttccccatgtagtaacatctcatgtactcgggtcaggatcctatgatcctcccaccagagggaaacctatattcaccaggttctgagacagcactgtccacagcagcagtgtgaggagggaggtggctgtggtgtgggcacaggcctgatatcggtcatttcctatccctgtgatcataggtgaggcatttagcctcattttcctaagtcacaaaatagaaataagaagtcgatcctcataaggccatgtgaagctgaaactgcacagggggagggcctggcacagggcgggggtgcggtaaacgggcgcagttgtgattcctgcagctcccgtcaccagcctcactgctcggtggctggcagagcccttcccaccccactctcagtctggcctaggtccccggagcaggtaggcaggcacttgcagaagccccctcactgtgtcacagatgagcaaattgaagctcaggaggtcagagagaacaaggagaccttgcagaggtgtgtggggatctgccggagtctgcgggggtatcaggaagagagggccctctgggtggatagtagggggcccaggggcccagtgcagctcccccactcctcccccagccactgagtccatccacacggctgggatctattggcccacaaatggcccccatgtccctttccagcagcctgacctcatccacttggagaaaaacaggaagctgggcattgccaggaatcggaacactcccttcctcagctctgggctgcaaggatgctgggatggcagggggctctgggagaagaacctgggacagggtgtggggtgggggctccacaggctaagccggggtgacctgggctgcccttggggctttggctttggctcagtcggccggacttggtctggcctggcattgctgagccagaccaggggctgggaggaagcagtgaggtggggagagggagaaggagctcctgacttttctctcccatgtcgagacagagccctggggcaccagggccacatctgccttttgcgttcatgggtcccttcctccacagaaaaatattacaaagtatattatacaactgtgttggtataaagatgaatataacccaagctggattcatgattatctattgattattattttgttcaacatttcttctgattataaaataaaattaaaacattttcagccaggcctgtaattccagcactttgggaggccgaggcgggtggattgcttgagcccaggaattcaagaccagcctgggcaacatggcaaaaccccatctctataagaaaatgcaaaacttagccaggtgtggtggcacactcctgtagtcccagactcaggagcctgaggtgggaggatcaccggagcccagggtgttggagggtgcaccgagctgcaattgcactgctccactccagcctgggtgacaaaatgagatcctgtctcaaaaaaaaaccaccaccaccaacattttcacggggccccaaaagcgtcagtgtgcctcctgtgtctaatggagaatttggccccgtgggggaagcttctaacgctttcctgtcctgcagaatccatgtaccccctacacagccatacagcatagccattagcacccaggggaatgccagcccagcctaaaaactgaacctccccaagccccagtttcctcttctgtagaatgggaaaaccaaaatgcttgcctcctggtgcttttttttgttttgttttgttttgttttgagacgtagtctccctctgttgctccaggctggagtgcatgggatgatcttggctcactgcaacctccacctcccaagtttaagcgattctcctgcctcaggctcctgagtagctgagactacagggacatgccaccatgcccggctaaattttgtatttttagtagagatggggtttcaccatgttggccaggctggtcttgaactcctgaccccaagtgaggctcctgctgcttggcctcccgaagtgctgggattacagacatgagtcaccatgtccagccctcgtgctcttttgagatgatcccatgaaaagtgtcaggtccaggacctgacccagataacccccgactgttttcaccatgtatgttcacctcagaccctggcagagaccccaacagcagcaaggtgcctagctttggggcttagggacatttccagggctgccacacctttcacttctttctcctctcctgcctgtccctcttggactcctgctcagggtcagacctaaggcaaccatgaatctaatacgtcgtgttagtccagttcacaagccactttggctccatgactccatcggtcctcagaactaccccatgagggttgtcttgtgtgagtcttcaccccattctcccagagaggataccaaccatcagagaggttaggtacctgtccaaggtcacacagctagaaagggcaaagttgggacaagcatttagatctgtcaagcctaccctcagttggcactgttacatctgacaccccaaaatgttcatgccagtcagtatgtatgtgtgtgtgtgtgtgatggttcttgtgacaaggtaggtgagaaggactggagtgactctggagtcctcaggacctttctgggatgtgctgacgggtggttcacaggggtccctgggcatctgggctcctgtctttgccctgcttaaggctggggtgggacctggtccctgtctccttggctgtgctgcagttgcaccctccttcctgtgcccctgctcctcctcactggctgtctcagtgccaacagaaccaaaggagcaaagtggcttaagataaccctgccattttacatcaaagctctagggtcatctttaatttttacttttttttttttttttttgagacaagagtctcactctgtcaccccggctggagtggagtagtgtgatctcagctcactgtaacctcggcctcctgggttcaagcgattctcctgcctcagtctacccattagctgtgattacaggcgcacaccaccatgcccaggtaattttttttgtatttttagtagagacagggttttaccatgttggccaggctggtctggaactcctgacctcaaatgatccacctgccttggccccccaaagtgctggattgtaggtgtgagccacaaaatttttaagttgtttgtttgtttgtttgtttgtttgagacagggtctcattctgtttcccaggctggagtgtaatggcccgatcatagctcactgcagccttgacctcttgggctcaagcgatcctcccacctcagtctcttgagtagatgggactacaggtgtgtgccaccatgcccggattttttaatttttaaaacttttagtagagaaggggttttgccatgttgcccaggctggtctcaaactcctggcctcaagccatcctcctgcctcagcctcccaaagtgctgggattacagatgtgagtcactgcgactggtgtaatttttaagtttgtattggaaaacaatttaccatcttcaaatatatattatctcacaaatagaaatatagtgagaagctggtattcatgttagattccagtaaagaagatttaggcttagggtgaagaaggattcacagcccatgagtattatttaagcacagaaactgatgactgtgtactgtgcagtgcatggagaaccctttataaagaacttccaggagagactgaatttatctggcagggatggtttgggttaaggttttaacttctgtgctgtttttgattaaaatctgccagcgcctctgactgagttagacctctctgatctcttgttactttgttatttcctaagaatctgagctggagctggatgacaaatacggtcctctgccccgtcagccatggacctgggggatgacctctcctttgccagaggaggatgggagctggtgggtgctgagactgacagtggatccacccaggcggagagtctcttaatgactcgacttggatcctgtcagggctctgcctgctctcttgctcttggggcatcctgtggctctcccagtaggggaggagggggcgtggctggacgcttgctcgaggccctccccataccagcaaagtcctgcccccttgactcctgaaggtaggctggctccttctccaggcctcccttcctcacttcctgccactctgctgaaacaggctccacggttcctgctggctccagcctcccgctggcctcttccacggccctctgcatctgaagctgcaccgcatccgggtgtgagtcttcaaatcgagtccattggcccagttggttctaagttccctgaaggctgagactcaccctgctctgctcaccatgctatgcccagctcagccagcccacgagaggaacccaggaaatatttgttgaacccattattgtatggattaatattgtaatgtaataaaatgatggattccacaaatatttcctggaagacgggtgtggaagtcacacggacctgggttcatgttccatctcagcaagctgctcagcctgagtccctcaggcttgttaccttcaaagtgggggtaatcattccaccgggctcatggggcagctgtggggaaactgaggcgtgcacatgcaacaattagcagaatgccgggtggggcagagtacacactgaagggataggagccactatgatgagactccctcttgtgctgggatggtgagggcgagggcccaggatccatcgtacaggcggatgcatggtgagcagaacacgtgtgaggcggggggcccgatgtgccttgggatggtaggaaagaattcatccctgccgttgacactggctaatatcatgtcagatgggccagagaatataccctagtggttgcctatggaggtcggcgagagaggagacgcggctagcacaggaagaggggagagaaggaaagggggcaccagccaggcagaccaggcagggtaggtaaatcaagcaatcctcccatcttggtctctcaaagtgctgggattatagttgtaagccactgtgcccagccttctcagattctttcctgccttgctaggagggtggggagcagagcagaggggctaggccctgggggtgggtagggaaagagagacaggctctggcatctacacccagatcctaaccccagctttgccactgtgtgaatatggacaaatcaccctctttctcaccctaggtctcagctccccctctgtgcagacacactgacagccacatgtggacttctcccccagctgcagctgggaatcggcctccagtcagaagcaggacagggaacaagcatggtggttttggtgtcatggattcaaatcccagctggatgactctgctcacctcacctgcctttcagtttccatgagctgctatatagcagagtggtcaggagcacagactctagagcccgacccaaggttaatccctgttctgccactgactatgggaacacagacaaggcacttcactctgggcctcagtttaccagtctcttaaatggggatggatataatcatcctcttctctagggatattgtgagagttaaaggaggtaattaacataaaacccttagaacagtgcttagcgcaggtgagggtcatgtcgctgaatataagacactgtctatgcattacacttttaaagatgttaaaatgcaaaaatgtgcacccctataattgaggaggtaaggtataatttcgagatactgcatagaaaacatcactgtaaactctaaaataataggcaaaacctaaagttcctgggtgttttctgtgtgccaggcactgtgccaaggacttacaagcattgtcccattcaaccctataataaccctatgaggaaggttatagaatcatcttcactttacagatgaggaaacagagaccccaagacattaagtgatttgtccaagatcacacagctttgtccacataaatgttgggcattcatcaccacaaccgcaactgtcccacccctttttggcttcatctggtttagaaattttttgtttgtttgtttttttgtttgtttgagacggagtctcactctgttgcccaggctggagtgcagtggagtgatcttggctcactgcaacctctgcctcccgggttcaagcgattctcctgcctcagcctcccaagtagctaggactacaagcacacgccaccacacccggctaatttttgtgtttttagtagagaagggggtttcagcatgttggctaggctggtcttgatctcctgacctcctgatctgcccaccttggcctcccagagtgctggaattacaggcaagagccactgtgcctgatctagaatggttttactccatggttctggaacttggctgcttgttggaatcactagggagctttaagaaatcctgagactgggcaagatagtgagaccccatctcaaaaaaaaaaaaaaaagcaacaacaaattagccaggtgtggtggcttgtgcctgtagtcctagctactcaggaggctaagatgggaggatctcttaagcccaggaagtcaaggctgcagtgaactatgatagtgccactgccctccagcctgaagtctggggctccccctcagagatttatatgtaattggtctgggatgtggtctgcacatttgggattttaaaaatgacccccctttcggccgggcgtggtggctcatgcctgtaatctcagcactttgggaggctgaagtgggtggatcacgaggtcaggagattgagaccatcctggcgaacacggtgaaatcccatctctactaaaaatacaaaaaaattagccaggtgtggtggcgggcgcctgtagtcccagctactcgggaggctgaggcgggagaatggcgtgaacccaggaggcggagcttgcagtcagccgagatcatgccactgcactccagcctgggcgacagagcgagactccgtctcaaaaaaaaaaaaaaaaaaaaagacccccctttcaacagcagacaggtgcttcacacacacacacacacacacacacacggaaaaaaatgacccccagtgattctactgtgcagtctggggtgagaacttctgttttactccaggtatgacttcagcagcctcctaacttctcaccagttgctccctccctgcctgaaatccatttgacacaacccaaagactttcatagcacaataaagataaatgacttaaaatgcagagactgattgaggagagaaaatggctgactctcattcctacacatgttccattgggcagctgtaagagtctttcctttttttttctatttttttttaatagagatggggtctcgctatgttgacaaggctggtcttgaactcctggcctcaagtgatcctcccatcttggcccctcaaagtgctgggattataggtgtgagccactgcgcccagtcttgtcagattctttcctgccctcctaggagggtggggagcagagtggaggtgctggatcctgggggtcggtagggaaagagagaggatctggcaacaacacccagatcctaaccccagctttgccactgtgtgaatatggaccaatcaccccctctctcaccctaggtctcaggtcctgctctgtgaaatgacatttgtttgagggccagcatcctagagctagggacacagtctctaagaacctgccttccagcaaccctcaaggccacacatccgggtagcttccctggggtctagcttgccctgccttctgaagtttatttgtttaacacaatcaagttattacaaagcttaattcccagaagatatcactgtacttttgagcttatgaagcaactcaaagtaaatttatgaggtgttgacaagtagaggccgtggggaaccagctttttgttgcatagagagtaatcttctatagtcagctggaggcttatcttcagttagatgtcgtctaagagaaaacatttcctcttttgagcagatcagcgtggagcctctgtaataactcttttgcacacttagttaaagggaaccctgttctgattcctgtggttagcaattaattgatgaggcttttatagttcttggaataaagaagaaatggaaattccaaagaagagacagacctataaagcccttttaatgagatacatgagtgggtagtggtggagtaagggagtgtcctggaaccagcctgaagggtgggcccaggaagctgttcctactcttggctttcagagttttgtgtttttttcttttctttttttttccccaaagtcatggctgaaggccttccagctgtggagcttaatcagaccccagtgattgcataaatcacaaacatctagcactagcccaatcaggcccaaacccaactcttttgaatgttagaacttgcacatttgaggtcaagttctgttggacacagagaggaagggtattcggaaaaggacagactttttccagaaactctttggcacccagcctccctccccccgagtcagatttgggagcacatccaaagcaaggcacccacacaaagaccagggacgctttccagatgagatccagccccttgtctgcccacaggcattgactgagtctccttgtgctcagtgggttagatacttgagcaggagctgggaggtaagtcaacttggcatcatctctgtctctaagggagttgaataatcctgtgttccatgtattgtgcctgggatgggagtcaagaggtgagagagggctgcccctcctttggagcagtttctacaggagagacaggccagatgcctggcctgactgccctgctgccccaccgagatagaccccggctctcggttccactcacggtgagtattaagcaccccctacgctacaccattgtatcccttccttactccactggctgccaatgcgctgtcttgttgacccagcctccaaataataatttttcttgattatggagttttggcacctcctgaaattttgctctcgaggcaagcgcctaaatcagctaatcctaatggaggccccggcaaacatctgactgatggtgacacatacaaaagcagcttcaagccacagtgcgttagtgcttagaaaaaaagccccatgagattccaaagagacatttgcataattctgggtcagtgcttcccaaagtatatgctgtgaaacatcaatcctatgaggtgcttatccaaaagataagagatttttgtggacaaataattttgggaaataatgcatactctaacttctgccttagatattcattatggacacgaacacgctaaaagctcagactcctgggtgaagaaacatcacttttctagcccatcctctttggctgcttagctgggtcagcttgggcaactctatcaatgtttcttaaagggaaatgagagggtgctcatctgagaatctcttaagggtgcttgttagagagtactggccggtcatggtggctcacgcctataatcccagcactttgggaggctgaggtgggtggatcatctgaggtcaggagtttgagaccagcccagccaacacagcaaaaccccatctctattaaaaatacaaaaattagctgggcatggtgatactcaggaggctgaggcaggagaatcgcttgaacctgggaggcggagattgcggtgagccaagattgtgccattgcactctagcctggacgacagagtgaggctccgtctcaaaaaaaaaaaaaaaaaaaaaaaggaaatagagagtacccagccctgctgcagactttgcaaatcagagtctccggagctcaggaaccaggaatttgctttgaacagtgcccagttgatggtgatgtatgttccacttgagaataccagataaactttgcagggccttggcttttcctgagtgttgtaaatatcaagatataagtttgaccaacagtttagtcaaaaagaaacttaggcacttcccaactcattctttgaggcctgataccaaaaccaggcaaagataacacaaaaaagagaaaattacagaccaatacatattatgaatatagatgcattctctggtacagaatgaggctttgtcaaattaaaaataagaaaaatttatactggaagtcctaggcagagagatcaggcaagagaaacaaagggcgtccaaattggaaaagagaaagtcaaactatccctgttttctggtgatatgatcgtatacctagaaaaccctaaagactcatcgaaaaggctcttagatctgataaatgaattcagtaaagtctcaggttacagaatcaatgtgcacaaattagtagcactgctatacactaacaacgaccaagctgagaatcaaatcaagaaatcaatccctttttcaacagctgcaataaataaataaataaataaaatacaatacctaggaacagacttaaccaaggaggtgaaagatctctacaaggaaaactacagaacattgctgaaagaaatcacagatgacacaaacaaatggaaacacatcttatgctcatggatgggaagaatcagtattgtgaaaatgtccatactacccaaagcaatctacagattcaatgtaattcccatcaaaacatcatcatcatttttcacagaactagaaaaaacaatcctaaaattcatatggaaccaaaaaagagcccaaatagctaaagcaatgctaagcaaaaacaatctggaagcatcacattactggacttcaaattatactacaaggttatagttaccaaaacagcatagtactggtataaaaataggcacttagaccaatggaacagatagagaacccaggcataaaactaaatacagccaactgatcttcaacaaagcatacaaaaacataaactggggaaaggacaccctattcaataaatagtgctgggaaaactggcaagccacatgtagaataatgaaactggatcctcatctctcaccttatagaaaaatcaactcaagatggatcaaagacttaaatctgagacctaaaactataaaaattttagaagataacattggaaaaactctgctagacgttggcctaggcaaagaattcgtgactaagactccaaaagcaaatgcaacaaaaacaaaaataaataaatggaacctaattaaactaaaaagcttctacacagcaaaggaaataatcagcagagtgaacagacaacccacagaatgggggaaatatttgcaaactgtgcatccaacaaaggactaatatccagaatcaacaaggaactcaaatcagcaagaaaaaaaataaaataattccatcaaaaattgggcaatggacatgaatcgacatttctcaaaagaagatatacaaacggccaacgaacatgtgaaaaaatgctcaacatcagtgggaaatgcaaattaaaaccacaataaggtaccactttactccagcaagaatggtcataattaaaaagtcaaaaaacaaaagatattggtgtggatgtgatgaaaaggaaacactttgacattgctggtgggaatgtaattagtacaacttctatagagaacagtatggagattccttaaagaactaaaagtagatctaccttttgatccagcaatcccactactggttatctacccaaaggaaaagaaatcattgtatgaaaaagacacatacatatgcctgtttatagcagcacgattcacagttgcaaacatatggaaccagcctaagtgcttatcgaccaatgagtggataaagaaaatgtggtatatatacacaatggaatactactacaaaaaagtactaatattttttgctccataaaaaggaacaaaataatatgttttgcagtaatttggatggagctggaggccattattctaagtgaagtaattcaggaagtaattcagtaattcaggttctcatttataagtgggagctaagctatgaggatgcaaagacatacaaaatgatataatggaccttgggaactcaggaggcagagattgggagaagggtgagggataaaagactacatattgggtacagtgtacactacctggctgtacactagcgtacactacctggctgtacactagcgtacactacctggctgtacactagcgtacactacctggctgtacactagcgtacactacctggctgtacactagcgtacactacctggctgtacactagcgtacactacctggctgtacactagcgtacactacctggctgtacactagcgtacactacctggctgtacactagtgtacacttagtgatgggtacactaaaatctcagaattcactactatagaagtcatccatgtaaccacttgtaccataaaagctattgaaacacttgtaccgtaaaagctattgaaatttttttaaaaataagaaaaatttaaaatataaaaataaaaacaaaatgccaaccaccaattccaacagcatatcaaaggattatacgccatgacagagtgggatttattttaggaatgcaaagttggttgaataaaaaaaatgaatgtaatacattgtgtcaatagaataaaagacaaacatcatatatcaatccacacagaaaaagcatttaacaaaatccaacacccctttatgataaaaataatcaacaaactaagactagtaaagaactcagtttgataaagggcatagacaaaaaactcacagttagcatcatatttaatagtgaaagactggatgcttttcccctaagatcaggaacaaaacaaggatattcactcttgctgcttctattcaccattgtgctgaaggttctagccagggcaattagggaagaaaatgcaataaaaggcatccagattggaaaggaataagtaaaactgtcaatattctcaaatgacatggtcttttatatagaaaatccattttaaaaaaactattagaactaataagcaagttcagcaaagttgtaggataaaaaaaatcagttgtatatctatacacttgcattgaataatctgaaaatgaaatttaaaaatgatcctatttgtaggaatatcaaaaataataaagtacttaggaataaatttaataaaaaggtacaaaccttatacttttgaaaaatacaaaatgttgttgatagaaattaagatctaaataaatgcaaagacatcccatatttgtggattggaagacttaatgttgttaagatgacaatacttccaaaatgtatctatacattcaatgtagtccatatcaaaatctcagctcgcctctttccgggaatcaataaactgattatgaaattcatatgaagattcaagggatccagaataggcaaaacaattttgaaaaagaagaacaaaattgaagaactcacacttgccaatttcaaaacttactacaaagctacagtaatctagacagtatggtactggcataaggatagacatattgatcagtgaaatagaatcaagaattcggaaatactctcacctttatgatcagctaatttttggcatggatgccaaaacaattcaatggggaaagaatttcaagaaatggtgttgggataactgagtagccacaaacacaaaaaaattaagttgcctctctacctcacattatattaaaaaaagttacaagtggatgaaagacctaaaactataaaactctttagaagaaaacatggggttaaactttatgaccttggattaggcaatggtttgttagatatgataataaaagcacaagcaacagtgacaacaaatagataagatagacttcatcaaaattgaaaacttaagtgcttcaaaggacaccatcaagaaagtgaaaggcaatccacagaataggagaaaatgtttacaaatcatgtatctgataagggtctgatatataaagaactcttacaactaaataaaaaataacctgatttaaaaatgagtaaaggatctaaatagacatttccccaaagaagacatgcaaagggccaataaacatgtgaaaagatgctcactattattagccatcaaggaaatgtaaattaaaaccataatgaaatatcatttcacacctactaggatggctgagattaaaaagaccaaaacaggcaataacaattgttggcaaggatgtgggggagaaaacatgatgataggaatatagaacagtgcaactgctttgggaaacagactggcagctcctcaaaaggttaagcacagagttgtatgatccagcaattccgctccaagttaggtacctacccaagataactacaaatatacagacacaagaacgcttgcatgtgaatgttcatagcagtattattcataatagccaaagaaggtggaaacaacccaaatgcccatcaactgatgaatggatgaataacatgtgatatatctatacaaggctattattttagtcttgcaaaggaatgaagttttgatgcatgctatgacctgggttaaccttgaaaacagcatgctgagtgaaagaagtcaggcacaaaaggccatgtactgtataatcccatttatttgaaatgttcagaaggagtaaaaatccatagagatgtaaagtagattaatgattgcttaggattaaaatgagggttggggaagtgggggatgactgctaaccggtatggggtttcattttcaggtgataaaaatgttctaaaactgattgtagcaatggttgcccaactctgtgaatatactaaaaatcattaaattgtacaccttattattttatttttgatttaattttaattttttgtgggggagatcttgttttattgcccaagttggagtgcagtggggtgatcatgactcactgcagcttcaacctcctaggctcaagcaattctcccacctcagtctcccaagtagctgggactacaggcatgtgccaccacaccaggctaatgttttaaatggtttttttttttgagatagagtctcgctctgtcgcccagcctggagtgcagtggcacaatctcggctcactgcaacctccgcctcctgggttcaagcgattctcctgcctcaccttcccgagtagctgggactacaggtgccccccaccacgcccagctcatttttgtatttttagtagagatggggtttcaccatattggccaggctggtcttgaactcctgagctcaagtgatccacccacctcggcctcccaaagtgctgggattacaggcatgagccaccatgcccagccgaattgtacactgtagatgggtgaattgtatggtatgtgaattataatctcaataaaactgtaagaaaagaaacctagggatggaactccagttgcaccccctgaccaataaggctcatcagcctcctcacacccaggaggagaccaagcatgactcattacctccacctctcgcttcctcttccctcctcagtgtgtttccccttggcttccccatcccacacgtgaccacacttatccacagaacaaaggaatcctggccactaaccttaggctggtgctcagcgtgggtcctccatcttctagggtgatgcgtctggctaattttcaagatctcattcaccccaacaagcatttacttagaacctatgttcttaaaagcacttgaagcaaataagtacagccattgccctcaattgctttcagcctagtaggagcgataagatctatcactgaagattcagttgaccagttgacgtaagagcaaaccccaaatagcaatggcttaaatgagatagaacttatttcacttacacaaaatagaagcctggaagtaggtagtcctgggctggttctgtatttccttggcatcactgggtattcaggctctttatgtctctctgtgtcgtcctagcatgtgattttcctgggccgagatggctgttgaagtgggttgaagaatgaatgggggctgggcatggtggctcacgcctgtaatcccagcactttgggagaccaaggtgggcagatcacgaggtcaggagtttgacaccagcctggccaacatggtgaaaccccatctctactaaaaacaaacaaacaaacaaacaaacaaaaatttagccaggggtggtggcgcgcacctgtagtcccagctactcaggaggctgaggcaggagaactgcttgaacctgggaggcagaggttgcagtgaactgagatcatgccactgcactgcagcctgggagacagagtaataaataaataaataaataatgataataatgaatggaaattgaggcagagggagcaaagcaatggcacagtagttgcatgtgcacatgcgtcaggagaggaattttaaaagatggaagatagtagaggcaaatgaaatcttttttttttttttttttgacggggtttcactctatcacccaggctggagtgcagtggtgcaatctcagctcactgaaacctccgcctcccaggctcaagcaattctcctgcctcagcttcccaggtaactgggattacaggcgtgcttcaccacgcccggctcatttttatttattttttatttttttgtattttttagtagagacaaggtttcaccatgttggccaagctggtctggaactcctgagctgaaataatccacccgcctcggcctcccaaagtgctgggattacaggcatgatccaccacgcccagctgaaaggatctaattcagagacagaggctggtgatggcagaggagggagaatgtcttacgagtccaatcagttattaaggaggtgagaggagacagcgtctactgcacttgtggagcaaatggccttggagaggagcagggatacgcttccaattgtcacaaggaggagagcatggcactgatggagaggtgggaaggaaaggacattcctgaggagggacaggttctgttttttaaataaaggtggccttcctgctttccctcctgcctgcctgccttcctgccttcctgccttcttgccttcctgctttcctgcctgcctgccttcctgccttccctctctcactctttccttcaacaagcatttattaagcacctactgcatgccacggcactgctctagacactgagactatagcagcaaataaacagacaaaatccgctatcttcctggagcacacattctattgggtggagagtgtcaactaataaaatgaataagtcagttttatcgatgttagaagatggccaacgctacagagaaaagtaaagcaagcaagaaggtagggcattttgatgggaagaagagaacaagagaaggattgtggaggaaaagtggtggggtggcgggattgcagctctcctcactcagaacactggtgcagtggggaatgagagccagagggccagaggggtgggtgatggtgtctaagtgtgggatcctgaaatcaggatgttggaggtgggacaaggtctagagtgtgctatgcaaacgggtggcagagttggagtggagcaaaaggtctttggaggtgaggagttcaagtgactgagaagccagggtattgaagttcacacatgtggatggtgaggtcacaagaatgttgacagggctggagtggagacagtgcctggagctaaagtccacaatgaacaaggaggttgggcaggagacagatggatgcactggagagaggtacagagtggtttagccagttagtgtgcacttcaaaggaactagggtttttttgtttttgtttttgtttttttgagacagagtcccgctctgtcacccagcctgcctggtgagctgtggcatgatctcggctctctgaaacctccgactcccgggttcaagcaattctcgtgcctcaacctcccgagtagctaagattacaggtgtgcgccaccctgcccggctaatttttgtatttttagcagagatgggggtttcaccatgttggccagcagtctcaaactcctgacctcaagtgatccacccgcctgtgcctcccaaagtgttgggattacaggtgtgagccactgtgcctggccagaactagggtttttgaaggaggaaggaagagaaaggacttggaaagagtagtagggagtaagaaaaacacgtgtccctctcacctcctggctctgaggatcctggaataggagagaaacaatagcttcctctgagccaggaggaagtatatctcagggacttgcttggtttccattagggccaggaagtagggggaaacttccagaagaggttgagagtagggtagagtgggagttccagaagaggttgagagtagggtagagtgggagttccagagagctcagcgggagggcttgggaagatgagaagaaggcttggccagcctgggatgagtgtctggtaatggtggatcaatggtggcttcttctggtgaacaaggatgcaggcctgatggggtagttttcagtgttttgtttttgttgttgttgttcgtttgttgtttttttgtttcgttttgctttttttttttttttttgagacagagtctcgctgtgttgcccaggctggagtgcagtggcacgatcttggctcactgcaacctctgcctcccaggttcaagtgattctcctgcctcagcctcccgagtagctgggattacaggtgcgcgccaccttgcccagctaattttttttttttttttgtatttttagtagagacggggtttcaccatattggtcaggctggtctcgaactcctgacctcgtgatctgcccgccttggtctcccaaagtgctgggattacaggcgtgagccactgcgcccaacccagtggtctcttaagaggagaaaaaatggtccagactgtgctgcccaagatttgatttgccttttttccaaaacattttattatgaaaaatttcaaacagacagaaaactggaaagaattatacagtgggcattcatataactaccacatagattctacaattaacgttttactctatttgcttaatcacatatctgtacatctctctctccatctatccatccgtccatctgtccatctgtccatccatcattccatccacccatccgtctacccacccatccacccatccgtctacccacccatccacccatccttctgcctttttatttattttttgaatcatttcaaagaaagttgcagacatcagtatattttacccctaaacacttcaggatgaatataattaactagagttcaatatttgtttgccttttttaagtaaaatttacacacaggaaatgcacagatcttaaatatgagtgagtttaaggtgagttttgacaaatgcctgtacctgtgtcactcaaacccctatcaagatatcaacagcagggattacaggcatgagccacccgaggtgggtggatcacttgaggtcagaagttcgagaccagcctgaccaacatggataaaccccttctctactaaaaatacaaaattagctgggtgtggtggcacatgcctgtaatcccagctactcaggaggctgaggtaggataactgcttgaacctgggaggcagaggttgcagtgagccgacatcgcaccattgcactccagcctgggcaacaagaacgaaactctgtctcaaaaaaaaaaaaaaaaaagatatcaagaacattatcatcacctgaggaagtcccctcatgcaacttctcagtcattcttatttttgtcaccatagattagttttcgcctattttaggacttgcattatgagtcccagttgtaaatactcttttggatctagctagtttcacagctagcagtgggagattcatccatgttgttgttgcacatattggtagttaatatcctttgttgctcagcgatattgtattaggcgattataacagaagaattatttgttcgtctgttgatagtcactggagctgtttctagtttttagcaattatgaataaagcagctgtgaaaattcttttatgagtctttctgtgacatatgctttcagttctcttaggtaaatacctaaacatgaaattgctgggtcatagataggtttcattttataagaaactaccagctttttacccaaggtggttgcatcattttacattctcactaataatgtatgagagttccagttgttctacatccttgccaacatttgatgttgtcaatctttaattttagctttcctggtgggtgtatgttggtgtctcattatggttttattttatattgtcttgatgactaatgatgttgagcactttttcatgtgtttcttggccatctgtgtcttcttttgtgaagtgtctattcaaatattttgcctattttaaaaattgaggtatttatctttttattattgagttgtaggtatcctttatatattctgcatataaatccattgtcagatatgttttgcaaatattttctccctgaggcttgcatataattttgttaatactgtcttttgatgaacagaaatttttaattttgattaagtcaatttatcaatcttaaaaaaaattgctttctgtgatctattttaagataccttacctattccccagtcccaaagatattctcctgtttgcttctagaaattttaacattttaacccaaaaaataactttagcttttgattgatttctatgatctatttaaaatcaatttttatgaatagtgtgagggaggaggggttgaagtttatttttttccaggccgggcacagtggctcacacctgtaatcctagcactttgggaggctgcagcagcttgatcccaggagttcgagacaagcctgagcaacatggcaaaaccctgtctcttcaaaaaatacaaaaattagccaggtgtgctggtgagcgcctgtggtcccatctactcaaaaggcttaggtgggagaattgcttgagtctgggaggtagaggctgcagtgagctgagatcacgccactgcactccaacctgggtgacagagtgagaccctgtctcaaaaaaaaaaagtttttttttttccatatggatattcaattgttctggcaccatttgtgaaatagactttacattggactgctttgatgactttatacaataatcaaatgactgtttaattgtgggtctatttctgaggtcttcattccatttatctatttgtttaaccgtatgttactaccacgatgttctgattactatagctttataattaataagtcatgaaggctgggcacagtggctcacacctgtaatcctagtgttttgggagactgaggtgggaggatggcttgaggctaggagttcaagaccagcctatgcaacatagggagatcccatctctacaaaaattttaactattagctaggtgtcatgtgaacctgtaatcctagctactcaggaggctcaggcaggaggattccttgagtctgggaggtccaggctgccgtgagctatcgttgcaccactgcactcctgtttgggtgacagagcaagaccctatctcaaaaaaaaaaaaaaaaaagtcataaaagtcatgaagtcagacgggataaatcctctaattttgtttgttttcaaggcggtttggatattctaggtcctttgcatttccataaaaattttagaatcaacacattcaatttttttttaattttattattattaaagttttaggatacatgtgcacaatgtgcaggttagttacatatgtatacatgtgccatgttggtgtgctgcacccattaactcgtcatttagcattaggtatatctcctaatgctatccctgccccctccccccaccccacaacagtccccaaaatgtgatgttccccttcatgtgtccacagaatcaacacattcaattttgacaagagtctactagaattatgactgaaattgagttgaatctagagatcattttggaaagaatagtcatcccagcaatcttgagtcttccaatccatgaacatttatttaggtcttgaatttctctcaataatattttgtaatcttcaacgtagaggtcttacatatcttttgtgaaatgtattcctaagtatttcatggttttaaaaagagctattaaagatggaattttaaaaacattatttttggccgggcgcggtggctcatgcctgtaatcccagcactttgggaggccaaggtgggcggatcatgaggtcagaagatcgagaccatcctggctaacacggtgaaaccccgtctcttctaaaaatacaaaaaattagccgggcgtggtggcgggtgcctgtagtcccagctactctggaggctgaggcaggcgaatggcgtgaacccaggaggcagagcttgcagtgagccgagatagcgccactgcactccagcctgggcgaaagagcgagactccgtctcaaaaaaaaaaaaaaaaaaaaaatttaaattttttgtaaagatgaagccttgctatgttgcctaggctggtctcaaactcctgggtccaagcgatcctcctgcctccacctcccaaagtgctgggattataggcatgagccactgtgcccagcaggaatttttttttttttttttttttttgagatggagttttgctggtcgcccgggttggagtgcggtggcacgatctcggctcacggctcactgcaatctccacctcccaggttcaagcgattctcctgcctcagcctcccgagtagctaggattacaggtgcccaccaccacacccggctaattttttttatttttattagagacagggtttcgccatgttgggcaggttggacctcaggtgatccccctgcctctgccttccaaagtgctgtgattgcaggcatgagccaccgcgcccggccaggaaatttttaaaatttcattttctattgacagcagcagaggtgagcaccagaaaagacagtccatcaggttatcctaggtgtggggaagtggggtggaggaacaccacttatttgcagatggctgtgcaagatctgggagggtggaaaagaaaggtggccatgtgatggggggaagtcggatgcatagcacttcggggaagaccgtcttcctttctctgccctgttactaagaaggaatgttcttcctcaacactgtcctgggaggtgaaggcaggacaatgccaaggagccttgggaaggtgttcctgttcccccaagccttctgagctgcatcatgcagccacccctctgtgggggctgttgccaccatggcctgagatgagcatggtcctctggggacagatgagctggcctcagtggtacaggtggtatactctcccctctccaggagaagccacaatgggccctgatccttgcttagctggctcagcctgcagggaggagatggggtctgaaacacctggacttccctttactcaaaatatcatagccaggacagatgcagtagctcacacctgtaatcccagcaatttggaaggccaagatgggtggatcacttgaggtcggtagttcgagaccagcctggccaaccctggcgaaaccctgtctctactaaaaatacaaaaattagctggtcgtggtggcaggtgcctgcaatcccagctacttgggaggctgaggcaggagaatcgcttaaactggggaggcggatattgcagtgagtgcagattgtaccactggattcccgcctgggcaacagtgcgagactccgtctcaaaaaaaaaaaaaaatcacatccaagctcctggcctggctttcctttccgctcccttccattgactgcctcccttggtggtctctccatctcgttttcccatgttgccccacccagttatagagtcagctggtcacatctctcaaaagtgccaaaacttccaactcatgctctgaggaaggattcttaagaaataagaatgtccaaactggatgtccaaaactccacccatgctgggtcctgtccctgtcttgttgggaagaatgtgggtggagaaggaaggaaggagagcaagagagcttcccccttgtgaagcaagaggaccattgggggaggagcagtggcagtgccaaagggggctttcatccctccgtacccctcacagtgccccagaagccccttcaaagaaagatgtactcaccatgcttcaagacaatgctagttgctacaacaaataaacccccaaatatattttgtttatttcccacttatttaccagttcattgcagatgttcttggtttgcaggtgaccttcccccatgcagtgatttagagaccaggctttttccattttgaggccctaccaccgcctggtctaactatcatcttctacactcatttaataggaggggaaagagaccccatgaaaggcataaccactcctcaaaagccttggcctggaagtgacacacgttacttctgctcccattccattggcaagaacgtggcatggggccaagggggcctgggaaatgtggtccctggctcggcaactgcttcccagtgacagcaacactggaaaggagagttcagatgttgctctccctgccactgagctctgttgagttttcaccagtcaggtggccttacttttaaactgtgcagagctctctggatgtgaagagttatctcccactccatcaccagcatggtttcttactgtctcctccattgctgaggttgttacaggctcttttccagcccctccctcctccctcagccacccggggtccccctccttctagtcgcttgcctaaacctgacctcctccaagacacttttcaaggatctcagcatcttccattctctgggcaccctgtttgccataaacacaagtaggagcactgtttggagaacatatgtgcccctctctcatctgcttgctaatgtttggtattcttcaacagagcaccaaggttttctccccacgatcaacaccaagacttcagatgcgtgtacccaacactaagacttcagatacatgcaccctgggggagagggcagatcttctcgcacacaggggagtggttgactgggggatccttataagtccttgcagaggggagggaaggagagcaaggggaccctgggcaggggcagacaagggagccagctattgaaagggaggctttggctatatttttcaattagctctatttttcagtcatatgttgagcatcttcaactttttctaaacagactaatcaaatagtgtccacttattaaatgctgatatggtttggctgtgtccccaaccaaatctcattttgatttgtagcttccataattcccacgtgttttgggagggacccggtgggagatcattgaatcacgggggcggtttctcccatactgttcaaatgacagtgaataagtctcatgagagctgatggttgtacaaggggaaacccctttcacttgcttccctcattctctttttgcctgccaccatgtaagacatgccttttgccttccatcatgattgtgaggcctccccagccacgtagaattgtgagtccattaaacctctttttctttataaattacccagtcttggatatgtctttattagcagcgtgaaagcagactaatacaaatgccaaccttgtgctgggcaccactagctctttttataagcatggtctgatttatcttcccaacaacctcgtgaggtaggaactcttattttatccccgtttggcacaggagaaaagcaagactcagagacatttagtaattttcccaaggtcacatagcttctagtcattctagaagagcttgggtttgaacctagatatccagcctcaaagtcctccagtcctctgtgcctgtgtctcctcttcccctgggatacccagcatggcagaggcactcaatgctcattgactactcatgtcctcctccacacttcccagccttccgtgcagtcagggtggggtcatgaggcaaactctgaccaacaggctgtgaatggaagtgacaggtgtcatttctggaccgaaacactgaagtgctgctgtccaaccctcctgttctctcttggcctttagtggcaaccacagatgccatggtttgaaatggtagagccactagaaggaagtagcctgtacaagggacagctaacctggacagttacccaacctgcagcagttttgtgtgaacgagaaaaatacacctttgttgcatcaagaagccgctaagatttggaggtcaatgtttacctcagcacactatagcctctcctgaccaatacaccagaacaggacactagatagagtagggttccactcagttggttactaacaaggtggtgctctcagacattttgttttataaactttacagtgctccagagtaaggatggaactgaaggactttctaaaacacaagttcccagctgggcgcagtggctcacgtctgtaatcccagcactttgggaggccaaggtgggcggatcacttgaggtcaggagttcgagaccagcctggccaatatggtgaaaccccatctctactaaaaatataaaaattagctgggcgtggtggcgggcgctataatcccagctactcaggaggctgaggcaggagaatcacttgaacctgggaggtggaggttttagtgagccaagattgcaccactgcattccagcctgggcgacaaagtgagactcagtccagtctcaaaacaaaacaaaacaccaaaacacaacaacaaaaacaccacaagctcccagaggcaggtgggagaacaccaagggtcttcatcagccccctggggagcaggagccccttgcccagcctcccatcccaggttcccctctgccctgcatcaaacttctccctgttgctggtttctagagctgttccctctctggcacagcccctctgtctccaccccgcagcagccggcttccagaagctaaagctcagacaccactggcccctccccagatgcaaccaagtacctggaagtctccccacgcctcacattgtctttgcttcacattgtctttcagatgagtccctggggatgcggagctcttgcgattctgccatctgatcctgcaatacaggaaatcaccactttctggcctctgctgactggagagccagtgtggcaggcaggaagctccagtctgggctgtccactgccaggtcaggtctggggagaaggtggagagtcccaggcccgagatgggctcctggttggggtggggagggccaggacagccagcgtgttcactcctcccacagacggttctacaaaccctcgtggaaactttctgtgcggctggccctgtgcttggtgctgtgggagcacaaaggcaagagatcatggcacctgacttccaggagcctccatcctgcaggtccaagtaggacattagctgcagagaaacagagcaaaggaataaatagcagtcagggatttttcacttgcaagtgacgtgaacccagggccagagtaagatctatagagaggctgggcgcggtggctcacgtctgtaatcccagcactttgagaggctgaggtgggcggatcacttgaggtcaggagtttgagaccagcctggccaacatggtgaaaccctgtctctattaaaaatacaaaaattagctgggtgtggtggcatgcgcctgtaatcccagctacccaggacgctgaggcaggaaaatcacctgaacctgggaggcggaggttgcagtgagatcacaccactgtactccagcctgggcgacagagggtgactctgtctcaaaaaacaacaacaaaacaaaaaaaaaaaaaaaaagggaaagaaagaaagaaagaaagaatgaaccagcatggcacatgtatacatatgtaactaacctgcacattgtgcacatgtaccctaaaacttaaagtataataataataaataaattaaaaaaagaaagaaagaaagaagaaagaaagagagagaaagaaaggaagaaagaaagaaggaaagaaagaaagaaaggaagaaagaaagaaagaaaggaaggaaggaaggaaggaaggaagaaagaaagaaagaaagaaagaaagaaagaaagaaagaaagaaagaaagaaagaaagaggaaaaaagccctgatatagctctggctgtgactgagtcacagccccatacctgaactgatcccatagcaagcacagggttcagaagtggagggggtaggagaaaagatgggctactccgacttcgaggcctgggccttatgagcctctctggatcctgggagtggaatcagcttcttctggaccacatgtctgaaggtgggcgacagatatttctcatggaatattggagtgttttgatcagaaggaggaaggatgctgggtagggtcacaaccaaggtctgctgctggtgggagaatggaatacgccctcagagaagtatgaaccaagggctgtgggaattcagaagagggagatgtcatgtccagctgagggggtcaaggaaggcttcatggaggaggaggcatctgggctgggccttgaaggatgaccagagtttgggcattggatctcttaggatgggaggaaagggcattgtgggcatagggaacaatgtgagcagaaacctggatgtaagccagagagaagcaggggctgaagccagatgaaggaaaggcctcgaatgccaagctaaggggcatggattgaatttgtggagccaaggatgggatcatcagatctgagcccctggaaacgcatactacccactcaggggcccggctccccacccccacccctggcctgctctgggtgcccacagatcccttttcctttcgttgagctcagacaagtctggagttttccaatagaaatgcttactcagaaatggaagaaaagtgaaaacagaaagtgtgattacagaccttagctttctcctgccaaagtagacaagcttggtacctgtgacagtccctcttctctgggctgaacctgccctctcccctctgcctgctgagccccaggagaggcgggggctgtgctgggggtagacagcgtgctctccctgtgggaccctcaggctctccagggtccattcctgccctgccctgaatagtactttctctgcagctgccctggctcagggcaagggggggcacccccaattctcaccccctaaattcctccccgaccctggagccacactgctcttattatgtcaccaggaggtttttccaagacgtctgctaagaatcaggtgaaaatcagctgaaggctgagtctgcgccagttctcagcccctgaagggtgggtagggccatgtcccagtcaaaggtgtggactgtggattccacctctgttgctaagatgggacagagaagtcccatagcctcccggagcctcagttttctcttctgcaatagagaactaataagctccagctcgtaggatttgttggaggattaaacagtatcccagaagtcacttacaggcatgggacatgtctgcagtacgtggtgacaatgaggatgatgaagaagaagataatggagatgaaggaaccaccaggaggggagacatggaccagcagggtcttttactttggattgctctgaggtgacaccaggtgtgtgtgagtccacattgacaggctgggcagatggatgggcggggggtcaggacgcagcatgggggctgagggcagcaccatcccgaaccacactcctgggctctgagctcgcctcacgctgctggactcaggagaacctcagcatgaacactcatcatgtcctctagcctggagcttcccaaattaaggaaggggtggcctctgggtcattccagaaagccctgtgattcagaccgtgccgatgttaccctgggtggactccctcagcctcagcctccctcatcagttaggggatcccaatcagactttttggaggtcagaggctgccaggaaagagggcttttaacaaggtttctacaaaccttgagattgctagaaagggcctgatggacggggtggggcaggcggggagaggggggagggggaggaaggctcaggtcaggggtcaccaggccttaatgatccctctcagcaaactaacttgaggatgtattccaattgtatttgcttatttatgtcaggaacataaactattgcattaatatattatgcctattataaaaatacgtataaaacgaaaattttaagagatatcaataggaaacaagttaaacaaatgacgtcccatgcatacaatcaactatgactgacctattttttaaaatgatgtcttataactcgataataagaagacaaacaactaaatgtaaagatggacaaaacaacccaggcgtggtggctcatgtctgtaatcccagcactttgggaggccgagacaagtggattgcttgaggctaggagtttgagaccagcctgggcaacatggtgaaaccccatctctactaaaattacaaaaactagccaggtgtgctggcaggcgcctgtaatcccagctacttaggaggctgatgcaggagaatcgcttgaacccaggtggcagaggttgtggtgagtcaaggttgtgccactaccctccagcctgggcaacagagcaagactcccccaccgccaccacaaaactcccgctgcaaaaaaaaaaaaaagatgaaagactctaatagacatttttttcaaagaaaatatatgggctggcatggctcaggatattgtgacacatgcctgtaatcccagcacttcaggagccgaggcaggaggattgcttgaggccaggagtttgagaccagcctggtcaacatagcaaaaccccatctctacaaaaaaaaaaaaaaattagccgatatagtggtgtgtatctatagtcccagctactcaggaggctgaggcaggaggatcttttgggctcagaagctcaaggctgcagtgagctatgattgtgccactgcactccagcctgggtgacagaggaaaaccctctctctcctaacaataataaaaaagaatggttaataagcacacaaaaatgttcaatttcaatttgttatttgaaaaatgcaaattaaaaccacaatgagataccatttcaaacccaccaggatggctataatcaaaaagacagataataataacaagtgtggtggagaatgtagagaaagtggaagcctcatacattgctgttgggaatgtaacatgatgcagccactttggaaaacagcttggcagttgcttaaaaagttaaacagaaactacccaagagaagtaaaaatgtggccacacaaagacctgaatgctcatagcagcattgtacattttaaaaaccctgtaaatcatccaaatatgcaaaagctggtaactggataaacaaaatgtgaaatatccattcagtgtaatactactcagcaataaaaaggaacaaactggccgagcgcagtggctcacattcgtaatctcagcacttcgggaggtcgaggcaggtgaatcacctgaggccaggagtttgagactagcctggccaacatggtgaaacaccatctctactaaaaatacaaaaattagccgggagtggtggcgcacgcctgtcgtcccaactactcaggaggctgaggcacaagaatcgattgaacctgggaggtggaggttacagtgagccgagatcgcaccactgcactccagccttggcgacagagtgagactcggtatcaaaaaaacaaaaaacaaaaagcaaaaaaggaacaaacttcttaaatgagctacgacatagatgaacttcaaaaatattatgctcagtaaaagaagctagacacaaaagaccacatattgtgtgcttccatttatatgaaatttccagaaaacacaaatctgtagagaaagcaaatctgtcattgctggagctgggatggctgtgaggattcactgcagatggatccaacaggactttgggggatgatggcaatgttataaaactggcttgtggtgatagctgcccaactctatacatttaaaaaaaaactgttgaatagtacatttacaatggatgtgttttatgtaaattatatcatatctcaatgaagttgttaaaaaaaaaatgaggaagcttgttaggtactggtttagaaaggtctccaagattttttttttctttttgagacagagtgttgctctgtcacccaggctggagtgcagtggcatgaactctgcttactgcaacctctgcctcccaggttcaagaagcgattatcctgccttagcctccccagtagctgggattacaggcatctgccaccatgcccagctaacttttgtatttttagtagagacggggtttcaacatgtttgtcaggctggtctcgaactcctgacctcaggtgatccacctgtttcggccttccaaagtgttaggattacaggtgtgagccaccacgcttggcctccaaggtgtatttttaaatggaaaaacaaagcacagaatacgctaccattggttttttttttttttttggtgttttttttgtttgtttgtttttgttttttttgtgatggagtttcgctcttttgcccaggctggagtgaagtggcacaatctcggctcactgcaacctccacctcccagttcaagcgattctcctgcctcagcctccggagtagctggtattatcggtgcctgccaccacgcccggctaatttttctttttctttttcttttttttttttgtgagacagagtcttactctgtcacccatgctggagtgcagtggcgctatctgctcactgcaagctccgcctcccgggttcatgccattctcctgcctcagcctcctgaatagctgggactacaggcacctgccaccacgcccagctaatttttttgtattttttagtagagacagggtttcgccatgttggccaggctggtctcgaactcctgacctcaagtgatctgcctgcctcggcctcccaaagtgctgggattacaggtgtgagccaccgtgcccagccccactgtttttttttaaagaggaacaggtgtgtatatatagactattatgcagatttatatttatatgtttatacttacacatgcctatatggatttgcacagacgctctggaaggatacacgaaaactggtgagactaggtgttttgggtgaaggaagtggatggcttgcaggccaggactgggagagtgacttttgtacctttaaattttttctttttaattttggtaaaacacacataacaaagtttaccatcttagctattttttaagtgtacagttgagtggtgctaagtacattcgccttttggtacaaccatcaccaccatccatttccagagctcttttcatcttgcgaaactgaaactctgtacccgtaaaagaactccacttcccctctccctaggttcctggcacccccgtttctctgtgaagaagcctgctccagacacctcatatagtggaatcacacagtattcgtatttctgtgacaagctgatttcacggagcacaatgtcctcaaggttcacccatgttgtagcatgtgacagaagcgccttcccttttaaggctgaataatatatgcgtgggccacattttgtttatccattcatctctccatagatatttgggttgcttccaccttttggccaatgtgaataatgctgctatgaacatgggtgtacaaatatctcttccagatctttatatctttattttattttatttgtcgagacggggggtctccctctgtcgcccagactgccctccaactcctggtctcaggcaatcctcctgcctcagcctcccagcgtgccggggttacaggcgtgtgaggcaccgctcccggccgctttacatttttaaagcatatgaaggtactacctatttgaaaataaatttaaacgtaaaaggaagaaatacaaataaatacaaatggaaggtgtacagtttcttcccatatcccctaccaaggtcccagcgggtgggtcccccgcagggcagcagccggctcgcccgcgcagggggtccctgctgagtcacgcgcagcggctcagcccggaggtgccctcgcctgcccgccgcccacccgctccccgccgattggcgaggccgcattcctgcgcgctgcccgcggccgtccgggtgactcacggtgcaggcagctcaggaacgcccgctcgcgggatgaggctgcggctcgcccggccacgtcctgaggcctgcagccgctggttttcctatttggaaactccttagacgtctccgcttccaacaagctggtctcctccctggcccccagcaggcagggaagcctgcggaggaagcgccctctctctctgtgcggggattctcaggcctgatctcctaaggaaccacgttctcctctcctcaattccagattccccaaatgcctgaaaaccgagcttacaggatggcgaaatctgacctgaaccaacctgagattaagttgcagtttcacttatctggctgcacgtgaatacttacatgtttgctgatggaaaaaaaaagaaaaagaaaaaaaaagtacatgtttgattacaagaatgcggtcccaggtaccctgagggtgccattctatacacgcaccaaattgtttctaaaatctaaagaattctgaattccaaagcacatctggccccaaggttttaagtaagaaactgtgggtctgtgttatacccattttacagagcagcccgggctcagagaggtcaagtcacagccggaaacaagccagtgggtctaagcccgagttcctgtcttcctcacggggctgcacacaaggctctgcctaccctgtctgtcccactccctctcctgtccttcctctgggaagctctccttgtccactacagccaaagacatcatccttcttggcaaacgacctttcccctcctgggtcacagagccaatgcctaccacttacaggcagttgttgggagacaagaaatctcaagtgactaagcccagactcagggctccagctccccaggccctagccttggtttggccacttttcagctgtgtgaccttgggtaggttacctagcccttctgtgcctcagttcccgcatccataaaggggcataataatgatacccccagccaggcgtggtggctcacgcttgtaatcccaacattttgggaggccaaggcgggaggatcacttgaggtcaggagtttgagaccagcctggccaacatggtgaaactccgtctctactaaaaatacaaaaattagccgggtatggtggtgcgtgcctgtaatcccagctactctggaggctgagacaggagaatcacttgaacctgggaggcagaggttccagtgagccaagactgtgacattgcactccagcctgggcgacagagtgagactccgtctcaaaaaaaaaaaaaaaaaaaaaatgaaggaggcctcagcccaccccaagccacccacattctctccccatttcgctagtgaatggagcaagttgggaggtggtaggtctagctgcggtgaggcccagacaggtcatggtggatccgggctgaccctaccctcatctttaagaacacctcctgggcattcgtccggccagccgactgcttttgggagctaagagaaagagcttgaggtgaataatctttctggtgatgctgggagagcagaggaccttcaagatcacctgacctgacatttggtggatgagaaaactgagtactcaggagggaagtgacctatgaaagtcacaaaaatctttcctggtgcagcggctaccaaaagccagtccagagtccctgccccacccccacccctaccccctgggtatggtgttagaggagaaggacccagtgaattcaggacctgggagttcacagccctccccttacccagctgggaatccccactgggagcgggggtcatctgggaggcctcctttctcccacatcccccacgcaagtttcagtgtgtttcaggccctgggctggggccaccaggcctctgtctgcctccctgaacaggagagccactgaacgtcaacctcaaacgaatgagaaagctggccttgaacaagtttcacttcccaagggctgtggtggctacaatctgggcagcggcatccccagtgctctcttgccagctccttgcaaaaccccgcccggctcactgaatgcaggaccctccttctcccttctccctggccccagggactgatccaggcccccagcaggggagaaggggcctcctgagcatgtacctctccagcccatagagccccccttccaacccagcagttccccagcctctgcctgcgcaagctggggtgtccatgccagataggacaacactttgaccttcccagcatgtctcctctctgttccatccccatccacacatccaccgccttagcagagaccctctcctctctttccctgcagcctggcagcgtgtggagtcctagtgtgtagactttgtcatcagacaccccacgttcaccttctgatgccaccactcctagctgtttggcagttctaaatgtctgcaaattatctggcactcctcccgtcaagaactgaagtctggccaggcacagtgctcactcctgtaatcccagcactttgggaggccgaggcgggcagatcacttgaggtcaggagtttgagaccagcctggccaacatgtcgaaaccccatctcaactaaaaatacaaaaaccagctgggtgtggtagcgtgtgcctgtaatcccagctacttgggaggctgaggtaggagaatcacttgaacctgggaggcggagattgcagtgagccaagatcacgccattctactccagcctgggtaacagtgagacttcgtctcaaaaaaaaaaaaaaaaaagaaaagaaactgaagtctgtgtcttttctcctcaaagccggcacaagaccttttctcctgggtctctctggctcttcaatcccaaaccctttgctttttataagccctcagactccctcagggcggtcagcatttgtggagtcatcttatttatttattttgtggatttggcagttacatgggagttgtatttctattttagtcagtatctttagatatttcattttaggaagacatttatttatttattcatttatattatttattgattgatttttctttttgttgttgttttcgtttttgttttttgagacagtctcgctctgttgcccaggctggagtgcagtggtacgatctcggctcactgcaacccctgcctcctgggttcaagcaattctcctgcctcagcctcctgagtagctgggattacaggtgtgcaccaccacgactggctaatttttgtacttttgagagatggggttttgctactttggccaggctggccttgaactcctgacttcaagtgatctgcccaccttggcctcccaaagtgctggggttataggggtgagccactgtgcctggcctatttatatttattttgagacagggtcttgttctgttacccaggctagagtgcagtagcaggatcacagctcactgcagcctggaactcctgggctcaagcgatcctcccatctcagcctctggagttgctgggactacaggtgtatgtaaccatatccagctaattttttaaattttttttgtagagattggggggtgtctcactatgttacccaggctggtcttgaacttctgaactcaagtgatcctcttgcctcagcctcccaaagtgctgggattacaggcgagagccactgcgcctggtggtctgtgatgttaaaccacgtcagctctttttactatttagctctctcccctatccccccccattagagtgtgagctccatgaaggcagggaggtttctttgcattgtaatctgctgcatcctcaatgcctacaacagtgcctagcacataataggtgcttaataaacattccttgaatgcataagtgaatggatgcataacgtgcccactactgtggggccaaaaccagctgtagactgggcactgctctctcctctgtgaaatggaagctgtggcactgcctacccatcaggggtgtggtgaggtcactggaaagggtgacctaatacgttgctaatgctcagatggggattgctgggagtgttgcctttctcagttgtcacagggccactaggcgagtccctccatctggaaagacaaatccaggcttcctgttgcccctggcccagactccatgaagacacaaaacctgtgagcttccttagagatcccatactccctccctgtttgtactccaattccagctctggcccactgatcacttgttgaaatcctggagtttcaggaccaggcttcatcccctttatcccagggtctatcccccctcctgcccagcgctggagaatggacaatgagttgttcagagcgtccattgagatcacctgatgaaagaaagaaagaaaggaaggaaagaaaggacaggaaaggaaaagaaaaagaaaaagccaagacgatggatcacacagccaatgtcttcccatttcctgcccagaaggtaggaatctcatgctgagcctatcaggacaaaggaaatgctgacgttaaacaggccccacctgcacacacagacaaggtagcggtggccctctgggaggcacctgctttctcttcaaacagagcagagaatgagggggtcctggtggctaatacagagccccaggctcccccaaccctcctgacggttgaagagcagtttctgtgccgttaggtggcacctctctggtgcctgcagagattatctacaaaggagcagggctgaagggatggggcctgccccctgtgcctttcagctgtttacacctggctctgccccagagtgtagaggaagggagtgaactgggggagactagtgttgttggcctggaaagacctaggcaaaactcaatttgagcagtttaggggttaaaggccgtcctagaaaagctagcctctgctaacagctagttaactttgcaccctccttgggaccctccctccctccagtgttatcctcccaccatccccacatccttatcttacccccacctctcactcctggccctggggggaagcgtcccagcagccctgttcagaggaagcacctcgttgccaggacgtggaggtaggccaattccaaacccttcttccttcaacccttggctgctgctgctttttttttttttttttttttagaggcagggtcttgttctgtcacccaggctggagtgcagtggggtgatcaaagctcactgcagccttgaactcctgggctcaagcaatcctcctacctcagcctcctgcatagctaggactacaggcacatgccaccagactcacctaatttttttcttgaggtggagtctcgccgtgtcgcccaggctggcgtgcaatggtacaatcttggctcactgcaacctccacctcccggattcaagcgattctcctgcctcagcctcccgagtagctgggactacaggcgtgtgtcaccatgcctggctaatttttgtattcttagtagagacagggtttcaccgtgttagccaggatggtcctgatctcctaatctcgtgatccgcccgcctcagcctcccaaagtgctgggattacaggcgggagccaccacgcccggctacagctaatttttaaaccatgtgtagagacggggttcttactatgttgctaaggctggtcttcaacttctgcctcaagggatctttccacctccgcctctcaaagtgcctggattacaggtgtaagccacctcgcccagcccctcggttcctctgaacacaccaaccacccatgcccctgccagtgctggtgccccccacctcccagccactccccctcactggggcacctttagctcctggctcactgcctgtggtccacccagcctcattcaaaatgactctaacatccacacggtgcctcgtctgcatcctgacctcctcgcctccagacattactttctccactgcacccagctgtccactcccaccgtcacatcctacaccttgtcctcttttctcacagcaccatccctgaatttttaccctgaccacacctcttatccttccagttctctttctctggggcaggttccttctaaagttctactttctctccggccatccaacccccccttctttccctccttttccaccttggggtccctggtctaccatgttgattattgtcttgcaacagccccagctcttgtttcttgctccccttgtcgtcttcagctggcagaacctcactgtggcaaagccaactgtgcacttttcccccggctgcaccagggaagccgaagttgctgagcctatctcatagccaggctgcctgatggtgcacattaacctgaaatgcacgcatggcactgcctggaagctgttccactttcttgccggacactgtcagagctgatcgaatgtaagaggtgaaagagagaagggatgcagaaattagaaatttctggctggggcaatagagttctagtagtaccattttctgaaatgatggggagaaagcggtttggaagagaaataatggcttccgcagttggttccacagttttacctcctacatagaccctaagctaatgccagtctttctgcatcctctaactctagcttggccccatgatcttgttaaaatgtcaaccagaatgcatccctcacctttgtagaggctttctgtggatttgcatctcactgcagaattaatccagatgtctacaagcctttcccagtctggctgctggctcctacctcaaaccttccacttcccacttcacccccatcaaacattcccattctccgtagacaccgaccaccttcctctcctcctccagtgcctgagcactgtcccacccaggacctttgtacctgccgtgttccctgcctgtcaatgattgcacaaataaagggatgtgtggatggatggatccctttctctagggatgctggtactggatggaaaatcactctggaaactgcctcatgctgcacatggtaggtgttttgccctggcaccacacctgacacacagtaagtgctaaataagtgctgataaatgaacttgtgtcacacgaggcgggatttagggtgtgtaggaagtgtacacaaagagccaggggcagtggggtctcagaataggaagggggtgagggagggtgagggctcccactgcccggccctgccctgcctgctgggcactccatcctccgactgtctactccaactgcatcccatccccctcacacatcctgctggttccctgtgccaggcctctgctcaccaaggacctccatcctagaatgccttcagaagggccagctttcacggagccctcccaagctagctcagcaattgcctgattcctttgcagttgttgattaaacagctactgtatgttcaccatggtcctgagcattcataattggggaaacagctgaggacaagatggagggccctgccctcatgcagctcacattctagtgggacagagcaaactcaccagaaatcaaaacgtcaacctcctccaggaagccttccctacccttgtccccaaatctctggtctccctcaggccctatgcccctcccccacgacacgcaccatcctgtactgtgaatttctctctgtatctgactccgcgtgggagataagaagacagggttcttgccgtttccatcttattctgaccagcacaaggccagcacttggtggtaactgtacctgtgggttgacttccaccggtggaaaaggtggggctgagggacgggcatggccacagccaggggctgtgtaagtgcctgcatatttggggagagcaaggagtgcaggggagcggggtgaagtgagatgctcattgtctcgccagatcttggagggcagcacaggtttcaaaggggttctatggcaattttcttgttaaaggaatatggcccaatttatcaaaccacaaagggaactgtgaactcagtcacacgcaaagtcatatcaaaacaaggtgcccctttcttccccctgcacctgctgattacttataaaagtttaaaataaagcgccgagtgtggtggctcaagcctgtaatcccagcactttgggaggccaaggcgggcgaatcacttgaggtcaggagttcaagaccagcctggccaatatgatgaaaccccatctctactaaaaatacaaaaattgctgggtgtggtggtgcacacctgtggtcccaactgttcgggaggctgaggcaggagaatggcttgaacctggaaactggaggtttcagtgagccgagatggcacaactacactccagccatggtgacagaacaagactccatctcaaaaaaaataaaagcatccctttcttatgcagcaagtgcctggcttagggaacctgttacccttctgcaatgaagtagaagttggaggtgctcttatgggtgacctatccatatagggtgctaaagggaactggaatgacttggggacatccctaacctttgaggctgacgtcatggtgataaccactcacccacaacacatcttgtggtgccagttctccataagatggataaggtccctaaacacacggctgcacgtctgatgttcttatgagcacgcaaaaggaaccaggccctccctgccaggaagctgcagggaaattagaatcatttgacgagttgtccattctttcatttgtctagtaaggaggtactgaaagcctcctcctaggagccgagtatggtgccaacagctacaggaatggcaaaccatataaatagcccaaacaggatataattagcgtcggacgtgcacatgtcatgggtggaatgatgcagaaagagtgatgcagcccccatctggggctggcatcacatgggacgaggcgcttgagctagacatggaaggatgagcagtgtgatcgccaggtggaaaggcattacagaggaacggcatgtgcaaacacctgggggtgcaaggaggtgtgtgtgaaacagcagggctggttcagggagcagcaggcagctatcccactcacgcagtgtgtttagtgctgggcctcttcatcccccgacttagcaagtccatcattctctaaggtgatttataggtaaggaagctgatgctcagagagtctgggtaacttgcttagagtgccacagccagtggcacagctcagattcaaagtcaagtttgtcaacttcacaaatctgtgttctttttttttaagctcccctttcccaaatctgtgctctcaactaccatgcggaactgtctttataatatgatgcaggacctctaagccaggcatggcaatttggacttgatccaaggcaaagttcctccaaatacctgctatttgcactgtaccttcaagttaaagctgtcagagcctagaactttcattttctttctttctttttttttgttttgagacggagtttcattcttgttgctccgggctggagtgcagtgacgcaatctcggctcactgcaacctccgccttgctgtttcaagcgattctcctgcctcaacctctcaagtagctgggattataggcacctgccaccacgcctggctattttttttgtatttttaatagagacagggtttctccatgttgggcagcctggtcttgaactcctgacctcggatgatccgcctgccttggccttccagagtgctgagattacaggcgtgagccaccacgcccggcatcattttcttaatgtttgtctttaaatgtttcacgttaaaaaacaaaaagcaaacaaacaaaaacccaaaatttaagtaattttggttgatcacggtggcttaccaccgtggcaaacccagaaatttgggaggccgaggcgggaggatcacttgaggccaggagttcaagaccagcctgggcaacaaagtgagactcctgtctctacacagaatcaaataatttgccgggtgtggtgatgtgcacctctggtcccagctacataggaggctgagccaggaggatcacctgagctcaggaggtcgaggatcgcctgaactcaggaggtcaaggctgcagtgagctgtgatagcaccactgcactccagcctgggccacagagaaagactctgtctcaaaaaaaaatttaaataattttttattgatgcataatgtacatatgaaagagtacacaaatcaatcacttttcatttgtgtaagaacacaataatttttcacccaggtccaaaacagaatattatgagtcttcagcagccccctccaatgaacaactccacagggtaaccactctccaagctttaacagcatagattaattttgcctgcttttgagttttatataaatggaaccataacaactgctcttttttgtgcctggcttcttttgctcagcatttgtgtggcttaattcattttcacttgatacagaattctattatgtgaatataccacgttacccattctactgatgaacatacaggttatttttcatttttggctgtgatgaataaagctgctatgaacatgcttgtgcatgactttggtaaatgccatgtactcatttctgctggaattatacctaggcattgaattcctgggtcatagggtagtgtagatatgtttagcttcagcagatatggccagtttccaacgtagttgttacagtttatatcttcactggaagtaaatcagacttccaattgttccacacccctgccaacattcgatactgtctttttcgctttagccctgtgggtgtatagtgatatcatgctgtggttttgcatatctctgagactaatgaaattgatcacttttcatgtttattggccactcacatatcctcttttgttaagttttaaggcctttgcccatttttatttctattgattttttaaattgataagtaagagtttttttttgttttttttttttgagacagggtttcactctgtcacccaggctggagtacagtggtgcaatcttggctcactgcaaccttcgcctcctgggctcaagtgattctcatgcctcagcttcctgagtagctggaattacaggcgtacaccaccatgcccagctaatttttgcatttttagtagagacaggttttgccatgttggccagcctagtctcgaactcctggcctcaagtgatccatcagcctcagcctcccaaagtgctgagccaccgcaccccgccaagagttcttgatatatttgggatgttatttctttgatagatatgcaatttgcaatattgtctcccaaataaatttattttatggaacattactaccataactaaagacccaatatcacatgtcacatatagtaggtaactgtaaaataaataaaattaagaccatgttatctttccattctagcttgatatcttgctgctggtggctgtggctgggatcctgatccctgcaaaaacgagagattagcaagagaaaaacagatgtgaaggataacagggagactctccttggtgtactcaaaaggctggacagagttagagaagaaacaagttcctcattttgcaactactaaagatcactgcagtgcacctttggtacatggtatgggggtccttgaacctcctagaatcatgccatatgccactcactttgtgagtcctccacttagggaaacacaactgtatgggatgtggatgcaatgaggttggtaagcaggggttgacataataagagtggtgttttagagaaatcaagtggcaatgagcacagaagcaaaggcggaggaggggagcctgagggaggagcagttgaggagatccaggtggcaaacggggagggtctaagccaggagtgagccaggggctggggtggcgtggggtgggaaagattggaggtagaatctgggaaagcagtgactggttgatgggttgatgtgttaagtgacactgggatttctttttttttttttttttttgagttggagtctcactctgtcacccaggctggagtgcagtggcacgatctccgctcactgcaagctccacctcccaggttcacaccattctcctgcctcaacctcctgagtagctgggactacaggtgcccgccaccactcccggctaattttttgtatttttagtagagacggggtttcatcgtgttagccaggatggtctcgatctcctgacctcatgatccacctgcctcggcctcccaaagtgctgggattacaggcgtgagccaccgtgcccagccaacactgggatttctaaactgggggactgggaggagagaggtagcaaagacaggagaaggaaattatggggagagaggagatgacaaaatcaatctgggatacattgaattggaagtgtttacatgacctcagagggagattcattcattcattcattcattcgttcattcattcattcatatttaccgaacatgtgctggcaccaggcatgcagctgtccatcagacagacaaaattcctgctgtaatggagcttaacgtttgtgggaaagacagatgggggaaggacagataaagacaagcaaataaagaggaagtggtgggaggtatgcctggggctcagggctccaggctgtggaatggatttggggcctggcagcagaagggcagcagttacagctggctggatgggtgagcttgcctagggagggggcagagtgagctgagcagaggagagggcggcctgccagcatttacaggccacaggggaacgagtgcccacaaggaaaaccaccaaggagcaatcagaggggcaaccagtcacaggaggaggcttcaaagatatgacaactggcacattcatgcatttattcaatctaacttcacttgaccccttctgtgtgccaagctctgggtgatcagaaatgaatgagaagcctctggaggtgacaggtgtgttgtgtgccagtgacgagaccaggccacatgaaggagattctattacgaagtccacatgcccatgcattgtgggggcacagatgatgggggctcacattttttaagcctgatatatgcaaggccctggggaaggcttcgtggtggtggggcaggaggcagagaatgggggcgagggcgtggcggcgagacccacatggcttgcacggacagcagaggcatcccgggaggctgggcattggcgtgagagcggagagagtcagccagaggacaaggagccgaggacggggcaaagatcgcacagggagagtgagctgagctctgaagggcatggaggacccgtgcgggttttgaggagagtacctgctgctcaggaatgttccaccaagcagacaggagtcagaggcggctgaatgccaaggcccctgggatactggggacagagcacctcttcctggctcctcagcacttagcaggtgccagagctcagtaagcgcccactctgcgccctgcacaagtgcgggatccacgcagcccacagcatgctgggtaaggcactgagtggggggcggtggggcatctggaaaggcatcttgcagggaggcaagagccaggtatagagcgtgggagcaaagaggggctagcacacgctccagggtctggggagacttctcttgggagaatccttggttgctgaggatgggaaggatgggtgaggcagaggtgccaatgcccggcccggtggcctgagcccagatccgccctctgatggggaaccccaggcccacagggacctccctctgcctgaccccagacctcctcttcctggtccaagcctcacctcaccttctcctcgactacatgtcatcagcctcatcccccagcctcgaagctcaggattggccggaaacatgggggctggggtcaagagagggcgaagacttcaggattctcttggccccatgcatagcagcccaaaactccctctaacactccctgctgttcccgcctcggaatcgccccttgggcaaaaggcctctggcgccccctactggcagttcagcttcaagactcccaagccctcacgcttcaaccctgtctgaagtgaggtccagcctgaacacttctagggccaattccaggctgcagagaggtggtgtggggcctgggccaggacggaagtcttgtgatatttccttgaacaccagcagcttcctaattggtcccctccctccctccttcagccacagctgggaaaatctctttaaaagcatatttgtaggataccactcaggagtaacaagtaatgaactattgatacccaacaatgacttgaatggatcctaagggcattatgcagagtgcaaaaagccagccttgcaaggttgcatactgtatatttccatccattaacattctcaaaagaagcaaattatagagatggataaagacaaggttgccagggattagggaaggagcgggaggatgtcagtggaaagggaagcataagaagtttcttttgagatgatggaacattctgtatcttggttgctgcagtgctggctatacatgaatctatgcatgtgataaaatgtcatggaattatacacaaagacaaacaaaaatgagtgcatgcaaagaatggtgaaatcaagcaaggtctatagttagttacatcgctttcctggttttgataaggcacaatggttacgtaagacggcaccaccaggggaagccaggtgctggctgcaccaggcctgtctgtactatttatgtaacttcttgtaagtcaataattctttcaaaataaaaagtttataaaaacggaaaagcatctctggccatattgtccacctggtcatcacctagtggcacccactgggccataaaggatgaagtccattctcccagcagggcacagagcccttcatgggctggccctttcttctggaatgacatttgccatctctcttaatataccaagccctgctctgagactggcaacgaaacaagaatatccactcttggaggacacagggggctgtacctcactcacagctccagttctacccggcagggcctctcttgttgataccagtgggtcccctcctgtactggcctgaggagacagtcatctgcttctgatgctcttgcccaagccagacaaaagtacctttccctacaacactgctggactgaagacttgaaaaaggacggctccagtgctctgaaaaccaaagagtcactggctcaatgtgctctactgtccaccaggcgatctggctgcaccccaggggctcctctacagcccttccacgtcttgtcccaccgcagaggctgtctcaccccaggacccaggactatccttgggcctgaggaacaaagactatcaagactttgcaaatgttccaggtgcaaatgttccaccaccaggtgctgggccgtgcgtgttgcacatgtcattttataatggtgagaagtttctgaggtaggcgtgaattcctaactttacagatgagcacactgaagtgaaccacttgcccaagatcactttataggaaatggcagagctagggattgaactccagctgtcttccttttcgtgtatcagctcattaatgggtatcttttaaacacctttttttttttttttttgacggagtcttgctctgccgcccaggctggagtgcagtggtgcgattttggctctctgcaagctccgcctcctgggttcacgccattctcctgcctcagcctcccgagtagctagaactacaggcgcctgccaccatgcccagctaattttttgtatttttatagagacagggtttcaccgtgttagccaggatggtctcgatgtcctgacctcgtgatccgcctgcctcggcctcccaaagtgctgggattacaggcatgagccaccgcacgtggcctcttaaacaccttttatgtgccaggcactgtgcatacgatggtgagcaacgacagagtccccaccattctgggcttatagtatcatggcagggaagtccagacagcaataaataatcatgatatatgagggtaaaatgacaaatttagataagagaagcatatgggtctttgatgatgtgtagcaaacaacgctgacctagctgggcattggaaggagctgcccaaggaagttacctgagcacagtgctaaaagatgactaagtaaagggagaagagaactacaaagagaacacagcacatgcaaaggtcctggggcagagggagtgtgaaacatttgtgaaatcgatgggaggccagtgtagctgcagtccagaaaccaaagagcatgtaaggcacaggaccgagcaagtgttcactgcagccagactgtgttctcagagccttgtgagtattgtctcatggcatcttcacaaccacctgctgctattgcatccccattctccaggtgaaaaaactggggcacaaaggaatgagtcagttatccagaagcatctggcaagggcaatgtggagctcacatttgaatccagggagcctgactccagagcccatgctctgagccactgcctcacactggttcacgagagaaggcaggccatgctgaagcttggtcttttccttagatgagaggaaaggtttttaggcagggtgataacttaatcagacatgtgttttgaaatgaggctggatgcagtgggggcaatgaggacgcgggatggggaagggggctgggagctgctgcagggtccaggccggagatattaaccccttagaccaggaaggggccctagtgatggagaggggtggatcagacaggaaggactaacagatacagatcgggcatggaggcaggagagacagatgagatggagggagcaggccacattcccaggtttctggctcacctgactcgggggatgatggaccctttgcctgggacaggtaaaaccctggaggagtacaaggtttggggaaaatcacaaatccagtcttgggctgaggaccgtcccagagcagatgtcaggttgtcagaggacaccaggattgggagcttagagagcagtcaggccaggcactatggatcagtgagtcactgatgctgtgggtgtagccagtctcatccagggagggaggacagcagaggaggggtggaccccaaggactctgcttgtactggctgtgcagcagagaatgagacacatggcccgaggtgggaggaaaatgaggggaatctgcaagccaagagaaagggaacatttccaagaatggggtggtcagcagaggatagggtgccactaaaaaggcaattaatacacagacccccaaatatccagcagctatcaatgggaaatcatcagtgagtttaggggaagaaactcagtggtgtgatgtgggcggggggtggggttgagaagcgaacaagagaagcggatggataccgtgagtttagatgacttctgagaagtttggctgcaaaggggaggaggaggaggatggtggcagctgcagagagacgtggggttgtagggggtttcagagagaggcacttcagcgtgttcccgtggcaaggggaagtggccagtatgatgcagtggataccatgggtgctgctcagatgccctcttccagcactgagcgatgatttcccaaaggacagggagggtcagcagccaatagcactcatctgagcctctctccaggatgtgtcctgggctgaagagagctgctctgcccaaatccatgccctcccttctcccaccttacaaggcagcccatatccagtggcctggccccctggccataatgggacacaagactgaggctgtcccagctccagggcttcccatggggtggctgaggccttagaaggggctgtgccccagctcagcttctccctcagccactcctgctggctccacccctcaggcattggtcccgagatcacgcccagcaagccccctgccaacgtctctgtttcctgggacattcaacctgagacagcagctaaatagcaagaagaggggccagtgatcatggatatttcctgaaaaaacagatgagctgtaccctggagaaatgtctgctctgaggtaccgaggaaaggaggccagtgaggccgtggtgagggagggctgagctttgtgatgggatgttaagtgtgtccaccattccgggaggtggaggtgggtcacctgttgagagagggaaggctgggagggccaggggttggagggaatgaagacccaaaacaattgttgcagaaggcgagagggaacagaaaccctcaaacatagctggtgggagattgtgcagctatagaaaacaatttgatggttcctcaaaaggttaaaggtagagttaccttttattccagcaatttaatccagcaaactcctggaaaataattaataaaacatgagtcatagactgagtgtttgtgcctcccaccccattaatatgttgaagccctaaccctcaatgtgatggcatcgaggtggggcctttggcaggtgattaggttcatgtgagaccataaaggtgagattagtgtccttgtaataaatggaagtgactggagctcgctctctttgtgccacttaaggacatagtgagaaggtggctgtccgcaagctgggaagagagcccttatcagaacctgactgtaccggccccttactcgaacttccagcctccaaaactgtgagaaataaatcttctgttgttttagccacccagtctatggtattttgttatggtagccctagctgaccgaaatgatatgtccacagaaaaacttgtacgtgagtgttcatggcagcattattcatattagccaaaaagtggaaaaaacccggctgggtgcagtggctcacatctgtaatcccagcactttggaaggccaaggcaggtggatcacggagtcaggagttcaagaccagcctggccaagatggtgaaaccccatcgatactaaaaatacaaaaaaaaaaaaaaaattagtcgggtgtggtggcgggcgcctgtaatcccagctactcgggaggctgaggcagataattgcttgaacctggtaggtggaggttgcagtgagccaagatcatgcctctgcacttcagcctgggagacagagtgagactctgtctcaggaaaaaaaaaaaaaaaaaaagtggaaacaacccaaatgtccatcaattgacacatggataaacaaaatgtgatgtatccatacaatggaacgttatttgacaataaaaaagaatgagggccaggtgtggtggctcacgcctctaatctcagcactttgagaggcagaggccggaggattgtttgcgctcagcagtccgggaccagcctgggcaacatggtaagaccttgtctctacaaacaatacaaaagttaagtgtggtggtacacgcctatagtcccagctacttgggaggctgagatggaaagattgcttgagcttgggaggtggaggttgcagtgaactaagattgcaccactgcactccagcctgggtgacagagtgagactctgtctcaaaaataaataaataaatacaataaatacaataaaaaggaatgaggtaatgatgcaggctatgacctggataaaacttgcaaacttctgtgagcccacagcccagtgggaaggcctggccacggaagcacaatcatatccagtgagctaagtgtgatgagagagacacacgcatgagatctgaggagggtgtagggggcaggtgtgagctgaggcttgggggaggaggaggaggaactggccaggggaaagggaaggaggcaggaagactgttggcccaaaagtatcgaggcaagaagcaacctggagtgtcccggggcagcgtgggcacagctggtatgcataggtgggaggggtggctgctgggtggaggattaaatggggaggagagcacccattcagaggctgctgtgatcacccagatgagggagactgatggaggatgggacatatttaggagtagaagattgggactctggggactggggctgccatgctcagagacagggagcaggggtggtttgagctttgttgcagatgggttgcactttgggtgtctggcagccatccacatggaagtgtctcctgagcaggtagattttgcacatgactcgcgagagagcactccaagctggtgctagagatttgggtgacaccagtgcaggcttggtggctgagtctgcagggtggaatggatgacggatggtggaagggagagagaagcgggccaagggcacaatctgggagtgggggcatcaccatgtatagggcaagcagagcacacagggagctgagaagggaggggtggagtggtagagaagactcatgtaagccaggcacagtgactcatactgtaatctcagtgccttgggaggctgaggcaggaggatcactggaggccaggagtttgagaccagcctgagtaacacagtgagatcccatctctacaaaaagtcaggcatggtggtgtgtgcctgtggttccagctgcttgagaggctgaggcaagaggatggtttgagcctgggaggttggggctgcagtgagctatgatcgcaccactgcactccagcctgggcaacagagtgagaccttgtctcaaacaaaaaaaaaaaaaaaagaaagaaaaagaaaaaggaaaccccatgttgctgcaggcaaaggaacagacagtccatgtctcaagaaggacaacagacagtccatgtgtttacttgcacaggattgggcacgtccccagacttagcaaccaagtgggcaccatggcctttctgagagtagcttcaggggcagactataggctgcaggaggacttaagggcatctgctgagaggcagtgggcttggggagagatccccgtggcagcccttatcagctgtgccactgtcgctcctttttatagctctccccatccagacggagcttcaagagggaagacaccacttctacattctttgtgtttcagaacaatccaattcattccaaacctattcgatgcacacctacagtgctcaccatgcatgtgctcagggctggggacgtatgactgagcctcggacttctggtgaggggcacggtaggtccctagactgtgcaaatgaagctctgggccaggttctgccaccaacctgccatgtggctgcaggtgatttatgatgttctctctagaggtttcctcattggtggtaggtgatttctgaagctccccttcatgacaaaaatgtgataattctaggacctctctgcctgctgctgtattatttgcccactgaggccttggcagggtcagaagcctggggtggtgaaggagatggtgagcggacacctttccaagatctccctgcctttcagctccttgtcttggggacccaatgtccttggccttaaggccccacatgctctgtcccttacagctctccagcctcacctcatacccatgctccctggttttctgggctccagttacaatggtcttctctcagattttgttctccccacaagctttcctgccccagagcctttacacatgccactcccactgactagcacccttcccttaacccctctgctcgactcctcttcattctttactgcttctctcaaatgtggcttctgcagaagcatctcaggtccctgggcaacattcacaccccatgacacaccttccgagcactctacacttctgctagctcttgtacaaatgtgataaccaagtaattatctgcttactgtctatctagtttcacccttggactcaaatgagaggggtccctgccatgggtcctcttgcaggagaaggctcctgtgtctgtggctctccccacagggtgaggaatctggggagccctcttgaagcctggacctgccctttagaacatgcttctgatacatggggccccagcatgccccgcccaaatagctccaagcccattccctcaagggtggactacgtcaccagtggggtagccaagcggcagctggctgcagggggtatgggcagttggcacacatggactacgatgtccacatatgtgcccgtgagcctctgcttgggggaggagggctctgtgggagggaagatgagagggaaggctgagcccagggcctgcccttctccggccaccacatttgggcatggaacttggaaaagtcaaagaagtttaaattagaacctggccttccaggtcattatcaagacacatttgtcaaagtaggagaatagaacatattttatttaacagttgttagcttgattgataacttttaaatatttagacatatggtatgaggcccctgtgtgtactcttgccctggccctgttggcaatggggtgggcttgggtcagcctcacccatcagaccacaagctccaccagggcaggcagcccatgcagtgcccctgcccagagcacagcacctggcacagaggagcagacaataaataccggctgtgagaaacaaatgggataatccaagccgaatgcttggcatggtgcaaatgtccaataaatatcagctgtcattgtctgttgaataaatgaacaggtgggttggtggggctgggggccaagagccacaagctgaggtggcttgtgtctgaggagggaagggacccgctgttccctggggttcacgcttcctttcttgaggttgtgtcctccttccccacaccctgcaggcctgcccagctcttcgtggcaaagcgggccccagatgggtgtacttgtgtgtcagagtgccaagaggggctgggagctcctgctagggctatgtccccctcccctaggacagaacagctgggacagtttccctctttgccttcaggggcctccccaggtccagacagaacacacccagcttagttcctttcttttcacataggcccaaaggttggatgggtggtagctgaaagaactgattttccccctacccaggctgtactctggtgtgggaggagccttttctggggaatgaggtcactcactggaccttgagcaagtcacactgctgctgcaggcctcagcgtccttgtctgtaaaatgggatggtgtgtggaactggtgcatgccgagcggcagatgcaaggtgtgcacttggtgaatgggaagaagccttgcacagaacaccagtgggtcaaggacagcagaggcccgggacccccaacaggaaagcagatgaaactggcccacagccagcctgtgagaggctcaggcaggaggtcatccctgaggcctgaggaggatagcttcagcagcccacactgaaggctgggtcagtcctgtttccacagtggggaagtgatcagagctgcctcatgactggcacagtgccagcacagggccagggcccacagggtctctgtgaaggcctccacgaggtgagggccagaagcagccaggaagccctccatcaaactcctcctcccagcacctaccattccagaaaacaaactctcacccccacacacgctatcgcacacgcacagtaggcgcgatgcaacagagaaaaaaccgaattaacccccaaacaggacgtgacgggaagggaaggggggatggggagttgggaagaaggaatcacattttgcaaactgcccactaggggtcaccgtaccctcagaaccgagggtgcagaagtcacaccggcctgcggctatgcgctggcggagggtcccagagagaagaaggcccggctgcgtggcctccgccgcccagcttgtgtggcaggaccgcggccgccgccccagtcacaggccagcagtcagtgcggcgggaagatgtccgcgcactgctgcaggatgagctccaccacctggttctggaacaccatggtcatgggcatgctggtctcttccacctcgggccgcagcagcgtgggcccgaacacaatggccacgctctgcaccgacatgcggttctgctcgccgtgctcgatcaccctgtggcaggggtgggtgggttcagggctccgaactgcgaactgcggggaggcgctgggggcttcagccgggacctgcctcccccttcccgcgcgggccgcccggctcaccggcagaggtgctggaagagcatccgcagagtgtcgtggttgggagcgggcagcgagcgcaccaagtcacgcacacagcggctgcgccgggcctggtcctgcaactctgggtgagggaaggtttagagggagggagtcggaacgggaggtagggggtatcggctgggcgaggggagcctgctaaaggggtgccccgccacgcccctaccccatccgccccacctgccccaggtgctcactgatggccgcaatgaactggcggaagtgcgagaaggggaagaggggctcgggcagctcccgaaagaagagcttcagggctccggtgataacgtggacgtcctcccagcgcccgtcatccaggtcaaggcgctcatctgtggcggaggaagggaggaggacggaagggaaatcagtaccccttgcgccttcaggccctggggcaggggttggggacgggcctcaccgtggtccaccttatagcgtagcttctggatggtggccaggtttccactgatgcggtacagcccgtcgatgtccagccctgggccagagggaggcgctgatcccgggttcagggatggggatagggtggggctacgggtccctgctatgactcccactcggggcctcccgtactttccccctggaccctgcgtccatccaggggtctccagcctgcggtcctggcaggaggcctgcgggcaccccaatgcctgccgccctcacccccgcagcgcacgtaccgcgggcctcgacggcgcggatgcactgctgcacgaagcgtggcacccggctcctctcgcgctcacacagcgcggccagcgcgcagccgaacacctggtctagggcagaggctcatcagctcctgcccagcctgcgccccgtcccggtcccgggtccccgccccccgcaggcctcgggtacctttgatgtagcccttctcccgcagcgactgcagtgtgggccgcctctggaggaacttgcggagcttgtgccggaccttgctcaagtcgctctccaggcccacggggcccagggcgggcgcggctgccgcggggaaaggcaggactgagtcaggaggcagcgccagggcaggccaggcaggccccagcaaccgtcactccccaggagaggcctcctggagcccccaccccatcctgccttgcgcacacctgcattcggtcgcgcgtcctcctctttctcctgccagcttcccaagcgctcgctcgacccgaagtccactctgctgctctcgctctcctctgggggcagctctgcggactggattcccatagcctcagagaggcggggccttgagccagctgcgggtccttccaggatggggcaagggacccgaaatgcactcccaacaggcatggcctggagaccctcagcgaagagtcctctcttcccttaaccaggttaactctccttacctccaccagtgagcctgagaacattcacctcccttagctgcatggagcccttaaggtgcagagacagtcatcctgttctcccacaccccttcctatcctggggactcctacccacctggtgccttctttctctattttcctcagctcctctaactgggtcagcattcctcaatacgtggctcccagttctgagcctgcacctccagctgtggccggagcactgccaacaactgcaccaatatcacctctctggctctggattcctacctctattaatacagccaaaagcttcactcaatgttggctcatagggaattaagggtcaaaaagccccaggtcatttccaggtcagtagttgtcagagggcccctgtcctagctctacttatgcaattggtgttttcagccttaaaaaaatggtcgactattgaaatcaatcctttaaaattttatctgctagtttcagcctgccattggttggcttgcagagtatttatttggccttctgcctcccgtgaaatgggaacttcctttagaatgtgccctaccctcacctggagagtcttcctgcagggccaaccccagggctggattcacagacttacagaaggcagtttcttcagccgcctaccctgccatcctagccattagtggggactgcatttgcattacccactggtaccttagagctccctgagcctgagcagagggccccactcataatggccaccccctccccactgcccctagaggccctgggctctgcttaccagctcctggatgccctgagcaatggccttatgccaggtgctgatgatggcctccgagtcgtgctggatcaggtactcagagccatctcggctccgtagctggagggacacaagtcagtgggtcatctctggtaccctgggtctgccctgggggttggccctagttgggggtaggtacagagatagaggtgacctgtccctgcccccaggcactcagagcttaatggagcaagggcctcaccccaggctaagtcttggatctctgcctcacgtaaagcagtggctgacagcatctctgtgttacagatgagcaaactgaggctcagcaagttttagctgcttcctcatgggcacacagctagtgagtgatgagcacagagctgcatggctcaattgtctggtacactttccctcccccatcctgcctccctgcaagccacagaacatggcaggcctcatgcagagcactggcctgcaaactaagtgaaagaaacttcctatgtgaggccaggcacgatggctcatacctgtaatcccagcactttgggaggccgaggcgggcagatcatgaggtcaggagtttgagaccagcctggccaacatggtgaaaccccgtctctactaaaaatacaaaaattagccaggcatggtggcgggctcctgtaatcccagctacttgggaagctgaggcagaagaactgcttgaacccgggaagcggaggttaccgtgagccgagatcatgccactgcacttcaccctgggcgacagagcaagactccgtctcaaaaaaaaaaaaacaaaacaaaacccagaaacttcctatgttgagacccctgtctactagaagcaacagtgaatatagggagagaggatttgaaagctgatcatggctgatcccagggaaagaaaggtctccccttgcccctccccatacacacactgaggactcagaaacgttgtcccaccttctgcagccaggagtccccaccacctcccacactccagcctgggcaacacatcttctgttagcccgcttcatcatgaagcataaattaaacagaacaccagagggaaacttgccaccataggactgacgctcaaagccctttctgagttggatggcagcttagttggattccttatcagcctctggctctgaggacccagtgttccaggttaatgtgaatgtttggcggcaacagctcacaccaaccctgcccttttggttcagcgagagtcagagacaacagaaactgtctcagaccccaggacacaacttctagaattggattggactatctttgctgtccttttaaacttatacttgaagactatttaaactgctttttaaaatgaaatgaggctgggcgcagtggctcatgcctgtaatcccagcactttgggaggctgaggcgggtggatcatgaggtcaggagatggagaccattctggctaacacagtgaaaccctgccactactaaaaatgcaaaaaattagctgggcctggtggcacgcacctgtagtcccagctactcgggaggctgaggcaggagaatcgcttgaacccgggaggcagagattgcagtgagccgagatcgcaccactgcactccagccagggcaacagagcaacactctgtctcaaagaaaagaaaagaaaagaaaagaaaagaaaatggcatatctcatcccctagccctcccctgcaaaggacagagaaccttcaagaggcagataacacagcctcactctaatcaaagcagacaagagccctgctcaagattatcccagagaatggcttgacaacacttctaaaacaacagccatgatttttggcagctctctcaaaacataatcagttcatatttgcaagtttcatatagagggcaaagctgtatcattacatagcaatgtatttcacaaaatattcacccccagccaggcacaacggctcatgcccataatcctagtgctttggaagggcaaggtgggaggagtccttgagaccaggagttcaatcctgggcaatatagtgagaccctatatctagaaaaatttttacaaattagccagacatgctagtgtgcacctgtacttccagctactggggaggctgaagtgacagcatcacttcagtccaggagttggaagctgcagtgagctacgatcaagccactgcactccagcctgggcaacacagtaagaccctatctctaagaacaaacaaataaacaaaacatttatcctgctgaccgcacaggcaaatgctagcagcttttggcggactgttgctgaagttttctgtaactcggggtgactagaaagacctgctgtgaaaatttcctgggcccaacaaagccatccatcctcaatgatataaaatttggggctgtctcttgaggaaaaccctggagctgcctacaggccgccctgcatggagggaggatggccagcagtcaaccaggaggcaggggcttgtgatttccattcaggcctgcccaccttcccactggcctgagcagcacctgccttccagtccttgccagcaaagacaactcaaaaagccctattctgaaactttcatcaaaagtccatcagtgatgatcttcattgagaactgtttgaaggatatacctatccctcaaagtcaggggagaaacatgactagcacaggtgatgtctcagaccgggcatggtggctcacacctgtaatcccagcactttgggaggccaaggcaggtaaatcacctgaggccagtagattgagaccatcctggccaacatggtaaaaccctgtctttactaaatacaaaaaaattagccgggtatggtggcaggcgcctgtagtcccagctactcgggacgctgaggcaggagactcacttgaatccgagaggcagaggttgcagtgagccaagattgcaccactgcacttcagcctgggcaacagagtgagactctggataataatcataatcataatcataatcataatcataatagtgatgtctctcctcaatttaacaccatagcagatattgttagttgatcacagaactctatcctgccaagcccagagaagccttcagaattcttctcaagaaggctccaggctaggcacagtggctcacacctgtaatctcaaccctttgggaggccaaggctggaggatcacttgaggccatgagtttgagacctgcctgggcaacatagtgagcccccatctctataaaaactaaaattagccagatgtgatggaacgcgcctgtagtcctagctactcggaagccttaggtgggaagatcgcttgagcccaggggcttgtggtttcagtgagctctgaccgtgccactgcacttcagcctgggcaacagagcaagaccttgtctctaaaaacagaaacaaaaaataaaaacaaaaacaaaaccccacaagactccagacctactcatcagagtagctcatgagatgaaaccagttttccaactttgctttatagatatcctggctctagaactgaatggagcttggtgaataatcaggaaactacactctcaggttccttgcagaactgttttttctgagcttagacatgaggtcatgctcttggccttcatcataatgatgctacctgaagcagtcccggatcctgaattaaaccttcctggagctgttttgcagggtacctggcatgtgcttctagatcccatgttcatggagctacatacaagaaatttaagagtgaagggttaggaaaaagctttgattccctcaacatctgggtgggttttattatttgttcaacaacaaagagacatgcacctgatagcccttctcttttcacctcacctagcaggaaagtcggagctaaattttcttcagtaaccaccaccttagcacccatacatcatctgccccctaattcctctccatcttgagtcccatctcttacttgtttttcatggtcctggcttttcagttaatttgacagttcaccacgtgtgtttctgttgtgatctgcctcaaaccttctaggtactgaggtcagggtaagagtagtttaaaaacaagacaacacatggacagtgaagggtgtggcattgggagtaccctttctgggtcttctctcccttcctgcgggggtagcatggtagtcttctccactgccccagtttattcactggggatgcggtccagtcggaaatggggctctggctcaggggcagggaaagggacctggggagaaagaggtttcccaaccaggcctgtcacagtaagcagccagggacagggagcctcctgtctctctcaggctgggacgagggctgccattctagtcatgagaatttcctctcccagaggccctactcctcaccaccctccagggcaaggattattattaactcagctcctggagagggaactgcagaatatgtgatgttagaaacaaaggacaggtcccctggggcgggggtgcagcgttggccttgagccctgagaatggtagccccaattcttcccaggtcctccttcttggggcttgcctacagtaagggtcccacagcactgccaacaactgcaccaatatcacctctctggctctgggttcctacctctattaatacagccaaaagctgcactcagtgttggctcatagggaattaagggtcaaaaacccccaggtcatttccaggtcaatagttgtcagagagctggcaggcatcactaagccccttccctccttctccccaaccccgccactcacctccagcacattcttcctactggatttgtctttgggggcccaggagagagtggcccccctcagctccactgtgtactcaggggtggaaaacttggaaggctgcctctgtgggagagggaggaaggtcacagggagccctcagttcagatgtgtctgctgtggcactctgaccctaggaataggatggggtcactggcatggccaggaaacaactctggggaaaagtgccccaagtgttcctgaacccagagaccctgatgcttcttaaccatggagcctgctggctggcatgtccactgctgcccacccacccaggggaggacaggaaaggagtgcagtctgcatccctgcaagcaggtgtgcccacccccagcctccctgccctccaggctggagctggccaccctcaagactgttccccatctccagtgggctaaaactacttgtcttggagtgaatctgccagtatcacccccttcctgccaaggcccagctcctctgacactcatggaccactctctcagacctggtcatctccaagccagattagatagagcagatgggggctgggcacagtggctcacgcctgtaatctcagcacttgaggaggtcgaggtgggcggatcacctgaggtcaagagtccaagaccagtctggccaacatagtaaaaccctatctctactaaaaacacaaaaattagccgcacatggtggcacatgcctgtagtcctagctactcgagaggctgaggcaggagcactcaggagggagaggttgcagtgagccgagattacaccactacactccagcctgggtgacagagcgagactccgtctcaaaaaaaataaaaataaaaataaaaaaaagcagatgggatggtccctgccctgagggcctggccttaccaggccgcctgcagccgaggtctttgagtccttgaagaatgtcaggacgccaccctccagcacagtccaggaggcactccagtgcttcttcctaggtgggggtggggaagtgggggtggcaggacttagatttggtcctgggctgagggcccctcctaccccaggaacaagtcagagcttaggaacacaggctagggcaccccattatgagggctggaatcccgactctaacacctagcagccgagggaccttgagcaagtcactttatctcacagtgtctcagggtccacagaggaccactcacgaagttgttgtgaggattaataagagcctggcatacaggaagtgctcagtgaacatcgtcaccaaggcccaccctgccccggcctgagtgtagatgggctctcaccggagccgctttcccttgtctgccgtcttggtgcgatggagcacccctgccttgtccaaggtcttggtctaagagagagaagagagagcaggcgcaagagtgtgtagttaaggggtgagctatggggagtagaggctggtcacctgctcagctgccactctctatggtctgggcccgtgtctccactgaaccctcctcgccagcaccaccacctggctgggggtagggggtgatgcctaccctcacagcagctgtggcaggagagacttcctcccagctcccaacctcatccagctctgctgggacctatgggggaagacagatagatcccaccaagtccctcctcccaggaactccagaagccccccactgcttctgtggtggtcctgccaggacctcaatggctcctcccctaccttctcctctggagggctggcctgggctggggtgtcaccatcctggctggatttatggatgcttcgaggggcagggacagggacctggggagaaagacacagtcgtatatgatctcttcctctctccccaacacccccctttccccaggttgttacctggggcagctcccatcgaacagaggagtcctctggattgtagaagtatggcttcccgtgggggtcctccagcctcacccactgtggggagaggaatggtcagggcctccagcccagcttatgagaggggaggaaaagtttccctctaaccaggttccaagacagcaccagggagtctggaggggcaggtgcaggtgactgtgtttggctggtttaggctctgtgtgggagctgcggtttagagcactgaggcgacctattagtgaggaaggttgtggggaggactctgaggctgtccgggtccatctgccccctgcccctacctgctcctgagtgaagtggttggtgtagagcatctgcttgtcctggctgacatgacaagaccagccggggggtgtggtcaagggagaggtagggccgggctcaccgaaagagcccacgggagaatagtcctcctcggggtaactggtcagcgactcggggtagtccgtctcgggagtggggggctgcggggaacagaaggtggagtcagaggctctgagtgccagtactgcctgctggccctgccgttttggaccaggcccacccccttgccttctggtccctgaggctgtgggagcaggaggcggggtcagaagcgctcagaggtagctccgcacctcaccctctggtccctggggctgtgggagcagaaggcgtcagaggtagccccgcccactccagccctgcccctcaccttctggtccctgggtctgcagaaacaggaggcggggtcagaagcgcttagaggtagccccacccatcctgccccacccctcaccctctggtccttaggtctgtgggagcaggaggtggggtcaaaggcgctcagaggtagccccgcccactccagccccgcccttcaccctggggtccctgggtctgtgggagcaggagaaggggtcaaaggctctcagaggtagccccgcccacccatcaccaccccctcacccgtgtgtccctgggcctctgggagcaggaggcgggatcagaggcgctcagaggtagaaccgcccactctggccctgcccctcacccgcgggtcccctgggctgccagggctcaggcccggctgcatctccaactcctcctcgggctcgttctcggcctcgtcctcccaggccgtctcgcccgtcagcgggttgtagaagaacaccctgcggctctcctcatcccagtactggccccactcggtctcaaggctcacgtggctgtccaccgaggcaggggaggtggctgggctggcggcaccctcggcagcctcaaagggcgactcccaggtggtaactcccgtgtctgggttgtagtagtaggggcgcccggtgcccgcgtccgtgtgcgtctcccacaccgggctgggaaggggggctgcagcggcgcccggtgaagtggcccggggctgcctctctatgttcgcgtacacgggctccggtgggtcgtccacctgcgggaggagaaaggaggaattttgtgttttcagaaaccttccaaaatggtaacagaggtcccctctgggcagtgcgattataggggtttatttgttttcgctttattttctttaaacttttctgcagcctcaaaattttgtacaacaaagcattttaaaaatcacgtaagttcttctgctcactgtgacaccatcactaagccgtaaactccttgaaaggggaagtgcctgttagaagtggcctcttcttgagctttagccccttgggcgaccttcaggaagtcacactacctctctgcctcagtttcctgggtgtaaaatgtctgctctgtccattccggaaactgtagtgaagagtgaatgaggaaatgctcttgaaagtactttgtaaagtatttagtgccccagacgggtgggtcaattacattaattatatttatcaataataataaaacatcgataacccagttctcacaactgtgcactcacagaggcaagtcagaggttgggcaggaactgagaagtggtctggggcgtgcccctgtttatggtgcccattcagggccctgctgcattcttttttttgagatggggtctagctctgtcacccaggctggagtgcagtggcgcaatcttggctcactgcaaccaccacctcctggattcaagctgcattcttacagctccactgagagctcccaccccaccccactctcagcccagaaagctctgggattggaatcagcaccctgtctggatttggggactgaactttccaaggtgaagtttgcaggtgtcagaaccaattccagacaagagagggagacaggacagccagatgggctggagaatggaggggcaaagagaggtgaattgttttactccaccccaaaggagagtgagggcagctgggggttcaatcacatagaacataaacctagccatgcgtaagcctcccggaacagaggctctcctgattcacacctcagagctccctgctggctgcagggcaaagtctaagcccttaaccaggcacaagagaccgtccctcaccggcctgtgcttccactattatttcctgccactccttgccccttgccttgaactttaagctccagtagcaccagttgctagaggtccccaccgtccctgctgtgtttcctccaggcctaggctcatctgcagcctgcccaggcccatctccacccctttttttgcctggctgactccaattccttcttcaggattcagctgaggtgccaggttccagccttttcctgagattccccccatccccgtgcccccacattcagcccagcacccttggccccacagagggacagatgactacattctcaaaccccaggcagcagcatggcatacggagattactactattttcttttcttttctttttctttttcttttttttctttttttttttttgagatggagtctcgctctgtcgtccagactggagtggaatggtgtgatctcggctcactgcaacctccgcctcctgggttcaagcgattctcatgcctcagcctcccaagtagctggcattgcaggcacgcaccaccacgcctggctaatttttgtattttagtagagatggggttttgccctgttggccaggctggtcttgaactcctgacctcaggtgatccgcccaccagggcctcccaaagtgctgggattacaggtgtgagccaccgcacctggccaattactactattttctaagcatacacaatacttcaggggaaagcagatttccacatttcaattttgtgttttcggaaactttccaaaatgctaacagaggtcccttctgagcactgtgattataggggtttgtttttgttttgttttctttgaactttcctgcagcctcaaaattttgtactacaaaacttttaaaaattcacagaagttcctctgctgactgtgacaccatcactaagctgtaaactcctcgaaagaggaagcacctgttcagggtggtctctccctgagccttaggcagatgccaaaaaaaaaaaaaaattcatttttcaccaaactgatgccaaaaaagcaaaccaaaccaaaacaatgaaaagaagaaggaaaagaagaacatttgtttacccaacaaagattcacctgctctgtgccaggcactgtttgaggcacggggaatacagcagggaagaaagggacacaaatccttccctggcagagctggcactcaagtgcacctgtgtgtaaatggtgggggtgatgagtaaatggacagcatgtcagtgctgatcactgctaagcaagaaatgaaaacactgtcaatgaagaggatgttacagttttagacagggtgccagtccccaggcgcctgggggacagggagagctggggatcccagcccatcagttcttctctcctctccccttcctccaggctgctgtgtggctgagaggggaccctccaccccacttgtcctttctctacccccaccatagctctgatgtggcatcctgtagtccaaccacaacaggcctctcaccggcccccaacagaaaaggcatcctcccacctcgaagcgtttgctccagccattccctcagcctggaattcccttctctggttctctgcctacccaaatcctgctctctcacggtgctcagctgacaagcctctccagggagaggtcaaacctgctggcactctgctcactgctctgttgaggcccaatggcgttctgccttggtgggcagccagttgtccaaccatctgcccacctcctctgccccaaaaggcaggattttcttgagagcaagactaaggataatgtagctgattccatttgccccccagcagctgggccaatgccctgaagcacatagcaggtctgccacaaactgcttgtgtacacaagtctaacccatgcccagtttcagcaacaaacatgcctgacatgacagaagagcctggaatgagcttgagctttctgaggaggagggtcggagccacagaaaccaggagattcctggggagggcaggatggaagcagcggggagaggaaggcagaggaaccagacacacctcccatcctcccagctgaacgcactggggcaggagttgaaaggctccaccaggggtggatgagctgataaggaacaggctctttggagcaggaatttctacttggcaggctgtgggccatggctctgggtccacgaggagtcccaggccagtgaggctgatggggtcctcacacgaaggaatgtccccagcaggtacagaggagatttcggaggtagaagtttaggtccccagcatgacagggctgtcacaaggaagagaagatggggtatcatgctgcaggggcacagcagcattcctctgaaggaagcattctgaggactagggctgccagagacacaggctgcttctggaggtagtgaggggccctcactggaggtgactgagcagagtctactccctgttagggaagccatagccctgtggtgggtgttgaactgcagtgtccttcaggccccttcaaactctggaactctcggcagaccctgcacagtgctgagatagagatgctctcctctcctggcagagcctcagctgggttctaaccagctcctggggccaggtgcagtcacgccctccacatcctctggccttcaaggagttacaggcgcctgccacccctaccctcctccttgctcctgttcatggaggcccagacaagacccagatgcagctcataagcaggggcctgactacgggatcaatggctcttgggtcgcatcctagagacaagaagtggccttccgacctcaggccagaggaggagccaagagggacctggctctcaggctccaggctgcccagccccctggtactgccttacagtggttcaccccttatctccagttccctcccctgtccacaagcaggtggcagccctgccactcttgccccaagctgaccacctcttggatgggcagggcctccgagaaggaaagagaaaaggaagtatgagccccaacttccaagaggctccctgctctaagccccagctcacccagctcctaacagggcttgtggtagaggcccaccgggcaccccttgaccccagcatcccctacctgtgccggcaaggctcgactctgcctcctggtcactttggcgattatgtccaccatcctggcccctctgaactgccgggacagagccctgggaaggttttgggggtagagcccaggggcactaccccagtgctggcacagggcaacagggaaacaagaagttgccgagatggcgggaggctgagactccagcccatttcctgtcagggctgcggaagtgctgcctgagttggggcgggtggggtggaggggcctcaggttgagggtatttttatgcttctagaaacactgctggctgccccactcagtgctctaatgaccagtgagccgcatccgaggcccagacatagccatggtgtgggctgcacagaggaagatcacggccagacccagccacagcatgaactgcacagagagaatcacggctgagcctgtgggggaggggcgcgcttgcacagacagggtgggcagagggggcgctgagtgctgggggcctgggctggcctggagtggctcctggggcggaaacaggacaatgagtggttgtccactccctctaggcccagggagggtgtaatgggaaagaggaagcttgtgggggggaggggaagagttcccaaagaggaaggggtctgggcagatgtgatatcacagggagctggcatctggactgtgccagccccgaggaggacaggaaggattctgaccacatcactatctgcccgcctgaccacctgggtctgtctcctccagactcggtcaccaagatgcatatgccctcccacgcctgcatgcccacatgtgcccactctcacttgcgtgtccacatacgtgtacaagtatgcccgtgcctgtcccctcctctctaaggacccagagaagagggccaggcaccagcttcttccaggaggaaggttaaatcttcttcctggcctctcttcccttcaccccctcgtgtggggatgacagaccccagccacgcacagtggacacatgccctgagtaagaagttacagcccctcctctgagcccatgggtccatcttgtcttccctcctcccttagaagtgcttcctccccaggcttaagggccaggcagcactaagcccaccagcccacccctgctgaagtccacctcctttcctggtcaggctctgacccccacccttccactctaggcccattcttcctcctctggcccccaccctggatctctttttctcccctgccatgtctctcagcccctcttctcctgtacccactgtgggctggggacaaggaccccaagcagagccaggcacagtgtgaatgtggggcacgagacacttgtagagatcacactaggagcaagactgggccccatgccctgctctgcccacaaaagctctcataccagtgtcccatcccctgtacccgactcagaagcccagaccccaggggtagactaatcccctcctcgctatcagggtggaggacagcaggaatcacagaaggctggaggcctcatgcttatcacacacctgacccatctctctgtccccaccctgaggccagggatgaggactcacacacacacacacacacacacactacacacgtgtgcgtgcatatgacaggtcaccaagggttatgcaaccaggcctcagagacaggaatagcctctgtaaattccagagaggccagaaactctgagccaccagggaggagctgggtggagaggggagagaagaggacaggtgtggaactcaggccctcagcattgccctgcaggtagcatggggggcagggactccctatggcagagccaggagtgtcagtgtcagggctgggactgcagaatgggcagccagcaactcacctggcatctcacctgcttctcttccccagtaggaagctgggcccccatgatgggggtctcccagggggctccagccccaaactatagggagtgaacaaactcacacagttcctgcctgctcttggccacagaagttggctctcaggccctgtctcggattccctccccccagtgagaggaggtgatgaccacagtggctccccagaggggtccacctccctccaccacaccctcatgcctctgagaggcacaagggggagggtcaggagaggttctagaacaaaccagctgcacaacacccctcctttccccactctgacctcactcttccctcccaaaccctcataggaagtgctggggcaggagcaggtgcactaggaagacccagtcctctggggctagaggcaaaatgaacgcctccaaaccaggacttggcccaggaactggctcaggggctggcgaggggacatggtgtcctttgttgactcagtgagtctgctctgtgccacccaagccaggtggagggagagccagaaggaatggtgatctttgcctcaaggagctcagtcatgtccacacgacaggtccctcccccaaacacatgttctccaggacagaaactgggtctccctttaaccatcccggcctggcccagagctacatgtccaggggcaggatcggaggagctgggggtgaccccacaggatcctgggcctcaggcctcagtaggctttggggaactgtgcctagctcagccctctgagattctgatggaagtggtttgggccgggacctggggaaagtgtttaattttaagcctccttgggtgatttgactgtgcctcccaggtgtggcaccacggctcagtataatctttttttttttttttttttttttttttttttttttttaatggagtctcactctgtcacccaggctggggtgcagtggctcgatctcagctcactgcaacctctgcctcccaggctcaagtgattctcctgcctcagcttcctgagtagctaggattacaggtgcctgccaccatgcccagctaatttttgtacttttagtagagatggggtttcatcgtgttggccaggctggtctcaaactcctcacctcaagtgatccgccgccttggtctcccaaaatgctgggattacaggcatgagcagcccggctgactcagtgtaatcttattgcatggatgtggggtgagattccaaatgtaacggtttcaggtgagacccttttcttgggcttggggcagaagcttccattgattcagagggaaaaagagtggagccggagaccagagacttggactcttgtctagactctacttcagcttctcgctgagcagctgcttgaatttctgggcctcagtttcttcatgtgtagaacagagctgtcaaccctactccgtcacagggctggttctatgaaagaactgagcgggccttgggttcccacacccatggggattgggggaaagcaggcctgcacttctgcttttctgacttcgggtttcgattgggtgccctcggctctggactctgtccccagcctctgggtgacctcatggggctgcttgcctggcctgctcctccagggcggggtgggagctggggtggggcatcctcagggctcacaacgcttgtgctctaagtaaggctggcagacacccagcagggctgctggggccaggagggatcagaaatggtccatgaggggctgggtgcggtggctcaggcctgtaatcccagcactttggaaggccgaggcaggaggatcacttgaggtcaggagtttcagaccagcctggccaacatagcgaaaccttgtctctactaaaaatacaaaaattagctgggcgtggtggcgtgcgcctgtaattccagctactcgggaggctgaggcaagagaattgcctgaacctgggaggcagaggttacagtgaaccaagatcgcaccattgcactccagcctgggtgacagagcgagactccatctcaaaaaaaaaaaaagaaatggtccatgagggaacctcccagccagcgaaggctgtagggatgagccagactagggaggtgggaaaatgagaccaaggaatgatcaccttctgccctccccctcaaacgtatctgtgtttgcacccaccattccttccccctcccccagtggaaggcacaggggcctgccgtccaagccaacctcctcagcccggtcctgaaggaccccatagcctcccgcttgctcggaagtggcctcacctcaaatttccaacccttcctttctgactacctttgtccctttctcatttcaacaaactcaaggcctctccatgttggttttttttttttttagacagcgtcttgctctgtcacccaggctggagggcagtggcacgatcatggttcactgcagctttgacttcttggactcaagcaatccttctgcctcagcctcccaggtagctggctagctggcagtacaggcccacaccaccacgcccggctaatttttttttttttttttttagagacagggtctgactatgttgtccaggctggtcttgatctcctgagctcaagaaatcctcccacctcagcctcccaaagtgctgggattacaggcctgagccactgcacccaattggtctctccatcttaaaaagaaaatgttgactgggcacagtggctcacgcctgaaatcccagcactttggaggctgagcaggtggatcgcttgaggtcaggagttcaagaccagctggccaacatggtgaaaccccatctctactaaaaataccaaaaaaaaaaaaaaaaaaaaaataggcgtggtggcagttgcctgtagtcccagctgcttgggaggctgaagcaggagaaccacttgaaccccagaggttgcagtgagtagagatcacaccattgctctctagcctgggtgacagagagagagtccatctcaaaaaaaaaaaaaaaaaaaaagttttgttccctggacccagctctgcatctccttttaacaactaattcctttttcccttcctcctttttgagccaacttctctgttccctcacttagacaatcagcccactgcttagaggccttctaccacttccttgatgatagatctggtcctcctctggcctgacttctctccagtgtttgctctttaaaatcctctccttcttgggcttcctcaggccaggcctcctagttttccttctttttctttgctactgctcagcaattgggccccaggctccacctcctctgccacggcctcatgcttggtgtctcacctggcttctcactccaccgccttgggagagcccagccccaccggctgtagatcaacaactcgcagcacagtctccaggctcacatagcccattgccatctggatgtcctttgtacatgtcgaaaaccgtgtgccccaaatcaaatttgtcctctccctcctccttccccgatcttagcatctgagtgacatctacctctgtcactcaaggtagaatcatccttgcctcctgctggctttgcctcatctgacactgagccccattgatccgaccagcctaagccttgcagacctgcctaccagttctcaggtaacaccaaggttagaggaagacggaaacactgctgcaaggaagcaaatagacaccttgcaggcagggcaatgagtcaatgtccaggcagaaagaaagggtagggctcttcaagggagattgaagagacagccagatacaaggcatggacttggacgggatcctgaaccaaacaaaccagctgtgagagagatgttttaggataaggcagaaatctgacgatggcttaggtcatagatgacactaaggaattattgttaattttctcagatataataatggtagggtgtttacttttcagagatgcatgctgaagtttttgttttttttttttgtttgttttttgtttttttgagacggagtctggctctgtcgcccaggctggagtgcagtggcatgatctcggctcactgcaggctccgcctcccgggttcacgccattctcctgcctcagcttcccgagtagctgggactacaggcgcacgccaccaggcccagctaatttttttgtatttttttttttttagtagagacggggtttcaccgtgttagccaggatggtctcaatctcctgacctcgtgatccgcccacctcagcctcccaaagtgctgggattacaggcgtgagccaccgcgcccagcctcatgctgaagtttttaggggtgaaatatgatgtctagaatttataattcatcagcaataaataaataaaaataaacacggcaaatattgttttttctcttttctctctctctcttttttttttttctagtagagcagccagcaaggagttggctccttgctattgttaaatctaggcaataagtaactgtattctttttttaatttttttttgagatggagtctagctctgtcgcccaggctggagtacagtggcgcaatcttgactcactgcaacctctgcctcccaggttcaagcaattctctgcctctgcctccagagtagctgggatcacaggcgcccaccaccacactcagctaattttttgtatttttagtagagacagggtttcacaatcttggccaggctggtctcaaactcctgaccttgtgattcacccgcctcagcctctcaaagtcctgggattacaggcgtgagccaccgcgcccggcctgtattcatttcttaaaaatattattggccgggcgcggtggctcatgcctgtaatcccagtattttgggaggctggggcaggcggatcacctgaggtcgagagtttgagaccagcctgaccaacatggagaaaccccgtctctactaaaaatacaagaaaattagctgggcatggtggcccatgcttgtaatcccagctacttgggaggctgaggcagagaatcacttgaacccaggaggcggaggttgtggtgagccgagatcgagccattgcactccagcctaggcaacaaaagctaaactctgtctcaaaaaaaaaaacaaaaattatttttggctgggcgtggtggcttatgcctgtaatcccagcactttgggaggccgaggcaggcagatcacctgaggtcagactttcaagaccagcctgaccaacatggcgaaacccctcctctattaaaaatacaaaaattagtggggcatggtggcatatgcctgtaatcccagctacttgggagggtaaggcaggagtatcacttgaacccgggaggcagaggttgcaataagacaagattgtgccattgcactccaggctgggcgacagagcaagactcagtatcaaaaaaaaaaaaattctttttgtctgggcatggtggctcacacctgtaatcccagcaccttgggaggcagaggtaggtggatcatttgagatcaggagttcgagaccagcctggccaacatggtgaaactccgtctctactaaaaatacaaaaattagccaggtgtggtggcacttgctactcgggaggctgagacatgagaatcgcttgaacctggaaggtagagattgcagtgagctgagattgtgccacagccctccagcctgggtgacagagcaagattctgtctcaaaaaaaaaaaaaattttggccgggtatggtggctcacgcctgtaatcccagcactttgggaggcggaggcgggtggatcacaaggtcaggagatcgagaccatcatggctaacacggtgaaaccccgtctctactaaaaatataaaaaaattagccgggcacagtggcaggcgcctatagtcccagctacttgggaagctgaggcaggagaatggcgtgaactcgggagcggagatcgtgccactgcactccagcctgggcgacaaagcgagactctgtctcaaaaaaaaaaaaaaaaaatttttttacttttcttcatgttggacattttctttttttttcagttttaaatttgtttacttatttttaatatagaggcgaggtctcactgcgtttttcaggctggtcttgaactcctgagttcaagcagtcctcccgcttcggcctcccaaagtgctaagattataggtgtgagccaccaggcccagcctatttggacattttcataataaaaagtaaaaaaaaaaaaaaaaaaaaatcccttaaacttttttactattctccatcctcactgtcactaccatataagcgtgtggtctcagctatttgggaggaccaagcgggaggactgcttgagcccaggaggttgaggctgcagtgagccgtgatcgcaccactgcactccagcctgggtgacagagcgagaccctgtctcaaaaaagaaaagaaaaaaaagttgttcattatttctcacctggaaacagacttgcccttccagctccccccacccccgaagtgttacaaagtagttcctctccctttcagacacagctctggagccaggattctgggaataaggccacttaaacacgccctgtttcccctctgctgccaactgcgacctgctactgcctgagtcaagcagaggctgggacagtgggtgggtgggacctggctggcacaggtgagaggctgtgtctgaggtggaggctcccaggggaaccttggggcaggctggcccatcatgggaccctggggagaaggcagggtggcttttgtacccttgagcccaggagctgaggagggccaaacaggtgggccaggtagtctctacccgtaaggccagggcaccaaggagacagggagaattcctgctggtgttttgacatcacagatgccccatgcccacaggcccactggcagagaccaccatctcttctccactctagggcccccccaccaagtgggtactcctgcagctcgaccccagctctggggagcaaagtcatataaactcactctgtgacagctcagcagggggaacagagagaaccaccaaaccagttgccgccaccagaccccagcacagccgggacccaggacgcactaaagatgccatcacaggtcatggggaaagacaaacttgtcagtgaaaggtcacaggacaactggctgcccatccagagataaacataaataaacaagtatataagtaagggagggtccacatctcactctgtccatgcacaataaccctcaaaggattaaagatttaagtttttaaaaacgaagccataaatacaaagaagaaaacaaaatctaatatgctgtatgtatatacctatatataagcctatatattttatatatgtgtctctttatatagataaaagacttcaatatgctgtatgtacatataaatatatacaatatatactatgctgtgtgtgtatatatataaaagacttatgctgtatgtatatatatatatatatatatatatatatatatatatatatatatgactttgtaacaaagatgcaaaatataaaagccataaaataaatgagtgatacattggactacataagtatattttaagaaaacttgtgtggcaaaataatgctattagcagagtcaaaagacaactcagggtgggggagggaattacaactcatgtaataatagacaaaggattattttccctagtatagaaaaagctactagaactcaataagaaaaaagcccaacaacccaatacagaaacaggcaaaggatataaatagaccattcacagaaaaaaaagggggggaacaaacagcccttaaatatatgaaaagataatcttactggaaagagaaatgcaaatttaaagtaccttaagataatacattttatggtcaggttggcagaaaacaaaagtttgacaacagtcagttggcaaggctttggggaccagacactaatttgtgttggtgagggcacattggtatatgcctcatgggacatactcatcaaatatctaatatttatcttttgaccccaaaatcccacttctgcaatttttcctacttctacctgtacatatataacagtattcattatgacattgttgtaacagcaaaaaatgggaaatattccaaatgcctgtcaacaggagactggtaaaatggattatttgtagttgtagggaaggagacagaacctctctaggtacaatctccaagatacattgtcaaagaaataaaaagtaaacaaggtttttgttttgttttgttttgttttttaccttgttttacacataggacggtgttgcttgagagagaaaattaagtaatcagatacataattatactagtttgtactcagaaactttggaagaatgaagaaagaatgaatgaaagtggtgacttttgagttgatggagaacagagcagggaaacagtgtacatgtgacatttttactatagactttaaaatattgctttgatttaaaaaaaaacctgtaaaaatactatctagtaaaataaattcaaggctattggcaaaatagaggggctggagaatgcaattacaatttgaatacaaactcttaaggagactcaaatcaagcagagttttaaaaaaggactgattttggccgggcgcagtggctcacgcctgtaatcccagcactttgggaggatgaggcaggcggatcatgaggtcaggagattgagaccatcctggctaacacggtgaaaccccgtctctactaaaaatacaaaaaattagccgggcatgttggggggcgcctgtagtcccagctactcaggaggctgaggcagaatggcgtgaacccgggaagcggagcttgcagtgagccgagatcatgccactgcactccagcctgggcgacagagcaagactccatctcaaaaaaaaaaaaaaaaaagactgatttttagaacttaaaatatgtcattgtactagttgaaggagaagaaattcactcttgagattcaaatttgcagcctggaaggtcaagaagaaacatcaaacctcagagcaaaagtacaacaagaatgaaataaagagaccaaagataaactgggggggacccagttgggagcgctcacatgcaaaggaaagaaaaggtaaaagaaacaataatcgagcaacagtccgggcgcagtggctcatgcctgtaatcccagaactttgggaggccaaggcaggcagattgcttgagcccagaaatttaagaccagcctgggcaacaaggtgaaaccttgtctctccataaaatacaaacaaaattagctgggcacggtggcgtgcgcctgtattcccagcttctcaggagactgaggtgggaggatcacttgaacccaggaggtcgaggctgcagtgagccgtgatcgtgccatagcactccagcctgggtggcacagtagaccctgtctcaaaaaaataaaaaataaagaaacaataatcaaatcaagcaacaaatagatgttcctaagctgagaaaagaccggagtctacagagtgacaggttctgtaagctccaaatgagggtgctgagaaaagaatccccatcgaggcatgtgctaaagaatatgtgtttgattaggaaccccagagaagggacagctgccaataatgaaatggaaagtgtaacaggaagaaaaaggaaatcgataaccagatcagagggaaaaaaactgcaagataaaccaataaatgtaaaataagccaaaggtaatcaaatcaagtacagtagatcaattgttaaatgaaatgtgaacagattgaattctcccactaaaagacaaagagtcagcttgggtttaaaaatacagtgataggctgggtgcagtgcctcatacctgtaatcccagcactttgggagggtgaggcaggtggatcacttgaggtcaggagtttgagaccagcctgaccaatgtggtgaaaccctatctctactaaaaatacaaaaattagttggatgtggtggcgtgtgcctgtaatcccagttaatcaggaggttggggcaggagaatcagttgaatctggcaggcggaggttgcagtgagccaagatcgcaccactgcacaccagcctgagtgacacagcgagactccatctcaaaaaacaaacaaaaatccatgaaaataataaaaatacagtggtggcgggcaacacgaagaaaccccatcactacaaaaaataccaaaaaaaaaaaaaattagctgggcatggtggcacgtgggccatgtggtcccacgttctcaaggtgctgaggcaggagaattgcctcagccagggaggctgaggctgcagagagccatgatcacaccactgcactccaacctgggcaacagagggagaccctatctcaaacaaaacaaaacagtgatgtgacatatacaagaaattagtagtttcaaaaaatgataatagtaggaaataaaagaatgctaagcaagtacaaaaaaaagataaagtaaaataaggagtggtcatataaacaatagaagggtgaaatttaaggttaagcactagaataggataaagagggacaccacgtaatgatagaaaagcacaatttgtaacgaaagaacgctcgaaatctgcatcctcctgacagcgtcgtagttaaatataaaaagcaaaaactaggaaaagccccagaagagctttatagagaaaatgtgagaggaaggtttaacataacacatctctatcagaattagagtaaaagacccctgcccccaagcaaaggatacaaaggaaatgaaagtttgaataatacaatcaataaacatgatttgatgcagatagtaccttatatcccttaaatagaaaatatgcatttttccggccaggcgtggtggctcacacctgtaatcccagcactttgggaggctgaggtgggtggatcacttgaggtcaggagttgcagaccagcctggccaacatggcaaaatcacctctgtactaaaaatacaaaaattagcccggtgtggtggcgcacacctgtaatcccagctactcaggaggctgaggcaggagaatcacttgaacccaggaggtggaggttgcggtgagccgagaccacgccactgcactccagcctgggcgacatctcaaaaaaataaaattaaaataaaaataaaaaaagaaaatacgcatttttcttatgtgtctgtgaaaaacttagcaaaatcatttacttggtcacaaagaaattcataataaattttaaaagtggagagtttacacatctggagaaaatgaatgctttcctagtaaaatataaaatggccaaaattaactagaaggtgagtagaaacttaaataaactaattaccattgatgagaaaaaaaatctgccactgaaaaaggcacccggtccagagggtttcatgagcgggaactgtagaaacctttcgaattcaactctgccaacaccttcctcctccaggaagcactcctggatttccctcttgccaacaagattctgggagggcagctcctccaacatgcccccaacagctctctgcagacatatcatatcatatcatatcttccataccataactgccatgccatacaatatcataactggatctgctgttcaatttctcctggacagtaagctacctgagggcaggaaccatcctttatttttcattgctccctagcccccagtacagcggctgacattcactgactaggtgaatatggtaaatgaaaaagcagaaggcacaatcgtcattacactgtgatgtctctacgggaactgcccaagagatacgcataagaaggcagaataaatgggaagaaaccaacatgctcacagtcattcgattgagatttcctcctattattcaaatatttgtaatggagttaagctatttttatagggagggaatagtaatttacacatttaactgggccaaggaggagaaaggaagggggaggctgggatgattctgcaggcaggcccttctgctacctctgcttcctctctctggcccagtccctagacagacatggaggcctgggcaggggcccctgcccccctcctttcatgcctcacaggggacccccagccaggagagggcaaggaggcagggtgggcacccacagcagcctcagctggacagaagggtcctgcaggcctcacccggctcaggcaacagttctggaagttccctcaacaccagaatccttctgcaatctggaaacagagcttcccaaattttagcaagagcacctctgtgcctgtgccccagagccctagtcctggcagccctgtttccccttcaatatgaaccaacagccactgacctctcactccccggcacagatccagctcccaatctccctaacattcaggcatggagactcgaccacatccctgatcatcagctacgccctggtcacgatcatggactttcccattccccagggcctggcactgaccacccatccaggctggcattcagtactgatgcccacccctccctgtactggacgcagtcagctctaggaagggcagagaaaacaggtctatgggagctaagctatgaggatgcaaaggcctaagaatgatataatggattttggggacttgggagtgggggaagggtgggaggggggtgagggataaaagactacacattgggtacagtgcacaccagtcgggtgacgggtgcaccaaaatctcagaaatagccactaaagaacttattcacgtaaccaaacaccacctgctccgcaaaaccattgaaataaacattacaaaaaacaggtctagagtgaggtcaactgctgaggcctgggaagaaagtgagggggcaggtgggcttgtcctggggcccatcgcaggcccctgggcgctgaagggagccaaggactaagaggtgagagccaggcacaggctccagcgagacctgaagagatcatggggcctgcaggagagccagggggtgcggggggtgggcagggagatctctgggtggacagcaatgtggggtgagggtgggagggagatccaagaagctgctgtctcctaagtcaggtcctaggcaggcagaggggctcctgggacagcctggggctgcaggtgagtcaccgggagggaactgggtcaggtgtaaagaaaccagcagggccaccccagggtggctgccccacctgggggttgggggtggggggtgccggaggagggagtacgagcaaggggctagctagagtcccttcaacttggcctcagcttcctgctgttaccaacaccccttgccaaagtccccctagctggccccgaagggggacaggagggtctgtcccaaggccagttcctttctctcagtcacagtggcctcgggctgcccttggagtttgtcctaggaagtgggtgctgggcctggatccagaggggaggggcccccagatgggttttaggattcgggaaagggaggggagagattggggaaactgctgtggccaccccctagtcccccaggggcgaggactcactcagttcccagtggaggagaaggaatgagggccccgggctccttccagtcggggctgcctgctcatgtgcggcgcctccggggctgcttgtataagaaggtgcagcagcccggctggaacttccctcccagcggccaatgccccagcagcaggggcgggctccaggccagctccacctgcctgggccttcccacctctgggcggggatggtgaccgcaccctgaaatcccagagtcaggaccaagggaagagtctcagaggcccctttattgcactggctttggcctggcttcccagagctccctgagtggcctctttgtgggagaggaggagtcatccctgcttacctcccccgtctccctctatcccctctcagaagggtttgcttctgccctctcctgggcagcaaaagaacaggagatgtccctcctgggacatcaactcttccacaacagggctgggcacgcaggacgctcagaagaaggagcatgtgcctgccttcagcttgtactgttcttgttgaggggaacagggtggccaaccctaaaggccaccaggctgaaactgaacctgctggccagggtggggcttggggtcagggggcctggaactgtcctgaacacagccacttcctggccgtgtgagcttcgtcgtgtcactaaacctctctgaacctctgtttgtactcagggcaaatggaggtgcctacgcctgccttccaagctgctgggagcttaaccctgggttacaagcctttcagcaagagcccacaggactgttagcccctttgggactgcatcttaccacactttgtccccagtgtccagcacagtgaccagcccaccccaagtgctcaatatgcgcgattagagtgcatggggagtgacaaggctgtaaaacaccatccatggcaggagctcctctgttctgggggtccctggccctgtctggtagcctgccctaagccctgagctgctgcctgacagaagggcatccccacacactccccagtgcccccgtgccatgccatccccacatcctgccccctctgttctgcacccactttcttctgagatcccttctcagcaacaaccttctccccatctttagcctccccatctcctgcccacccacctgagcctggggacggttccatccatgaccctacaccccctctggccacactgtgtctctctccttctgcccgttgtccacacactcaattcgcaccctcacttcactactgaccactgccctctgccttcagcagccccctgaccagctgagcgtctagtggtcacttagggtaagtgttatacggcctttctctcacatgaccttcctgtgcgtccttcttctggacacttcttggcctctgagccagcactctcatgcttctcttccctttggcacctaaatccaggtgggccccatcttttttccactctgctcctccccaagtcatccccccgtcaggaagcagcaccactgtctgcccacgagtgccagctgggaatctagaactcaacctgatttccctcccacctccctcggcccccagaccctgcccatccatctcccaaacctctgtttccacacatgcccacgagaccaccaagagcttcagccattcttgaagccctggccacagggatttttttctcaatcccattcctgtctctgctaaaagcctcacagcggctgcaggataatgtgcacattcctggcaagggcccacgaggccctgcccgggtgggcacccactctcaaccctatgctccactctgagccccggccccatgtcttctcttgctggcctcctatccaagagggtgagtcccccaggatcgtggctgtgcctcagtcctctccagatccgaaggctcaccagggcttggcaggtattcagctagttgatgcctaatgaaggagtgaatgggcctggaggatcatggtggggaaactctgcctgggacaactaagagcagggatggggttcccttgcgggggcagggccaactccctaccctggactttgttgggggtggagcaccagggagacccacagctgcctcttgaataaagctctgtggcagggaacgtggtattattgcacacatcgcacaggggaggaaacaggaccagagatgcaaagcgacttgtggaggtcacaagtggggccagagagctgcctgtctctggccaatgtcctagattccccccctgggtaagtcccctacccctatcatcggtgcccctccctccatatgccactgcaactgggaacctgctgggagctggaggaaggatgggcagaggggccacctggcaggcgccctggcagccggggtgatctgtcttctcaggagatgtcaggacctgggcagtctccttcctctttggtcctggggcctggggtgttggcccttgcagacctacagagccctggctcataggtaaagggctgccgcacctctgcgcttctcaacacacactctctgtgcactctgtttgagccagaccctgggccagatgcgaggttcaaagagcaaggccattcccccacctccaggggctctgctcagatgggcaggcaccctcccaccgtcactaggacagagtggcagtgcccagccccgcccgccgggtgccgttccccaccctggccacaaggcggcgggctaccgctgcagaagcctgagtgaaggcggcggagacccagggaagccaaaccaggactacccagacagcctgggtggaccccctgctgctgtcaagcgcttcgaagccttacctcgtttaaggctcacaaccctaatccttaagtattgtgcttacaccagaggacgctgggcctgggggaacgtcctcgcgtgtaagttaagtggctgtcagcagctggcaggtgacccagcagaatccagttcccctttccctagtctcaaaacctgagctctgcattgtaacgagtcgggcggagggaacacccagcagcgggcctacggaggcgtgtctccttcgtctgggcatcccggactcagtcctggcacatagtgggcatcagtgttcatggtaatgacatcaggtacagcgaaagaaatcagaggctcccgaggatcagaggtcatctgtccaacccctccctttgggctaaagaacaaaccgagaccctaagagaggaaaagaactgcccctagatcatcacacggccggtggcagatggcagaacggttctgagcatctttttttcccctcgggctgcccctctctgaaaagttcctaaagttcaaaatgtcagggtcgcctagagtgttctgaggatgtaagacctgtttttaaaacgtgctctattttcgatttcccagatgaacacaactggactctgaagagggggaaaaaaacaacctcacttaaccggacgtctttctgaaacaaacccatcaagagttctttaaaaaaaggaactgaaatgctggaagcaccctcaaagggaagcagacgcctgactttcacatccaccctctcatctgaccccagactcctgggagacgggcaagtcggttgggccggggcaggcccgcaatcccccgttccgtgcccagatgcgcttcggaatacagaacagctgggacttggaaagataatatggggcacacacctgcagtaggttatataacctcccagcagggcttggggcagcagccgaccatcgagctcatttgcatttctgcagcgaaacatgaatattcacacaagtgcgataaataaagaccatcagcagcctcacatcagttcaagcgcaattttgccaccaattggattacgaaaagcctctgggcttccagggagctttggagcttgggaattgctgatgagggactgcgggcgtgcacccctcacgtttcgcggttggggagagggagctcatccgaagtcttcggacagaggtgggcgtcgtgcccgacgctgagcggagcgggtctccttgcgccccggctccgtgcgggcgcggtccctagcgcgccacccgcctccgcgccccagcgcccggggaggtacctgctctgcgctctcctccggcggcgggacgtgcaagtcctggatgacctcgtagacgttctctgagtcgctgcgcgccagaggccgcgggcacacccaggagcccgccacgctgcaggccttgaagctgccgctgcttcctaggaggccggcgggaggcgagacggcggcgcaggccaggtcgttcagggactgcgcgggccgcacgggcgccgcgggccgcaggtacaggcaggctggcaggccgggcgccaggctgctgcgctgggtcgcggcgccgcgttgcgcagggccgcacagggagctggctcggcctccggactcctcgggggcgccgtcggggcccgcggtcgccgccgcgctcacaaaccggtagtcgtaggcgagcggctcaggggccgcggggctcgggtggggacctggcggcgcggcggcggcagggttgcccagcgcgggcagctcgcgcacgtactgcgcaggcaggtagaaggggcggccgccgggctcacgccgcacgtgccaccagtgctcggtgctgcgccgcagcagccggtagcgctcattcggccggatggccacgcggcgcccgtccttgccggtgtactcgaaggggtgctccaccagcacgtacacgtcccccaccacgtccgccgccatcgcagccgcggcgttttcctgcgggcaacaagaaggagggccgcggaggtcaagaccaccgagcctggaatagccccgcactcggggacagacttgggttcgagtcccgatcctgcactcgccgttcgccttcgggcctcagttttcccatctctaaaatgggaacttgcataaaatcacatgtaaggcttccattcttacactcagtgctggaattaggacagcccttcgttctgtggggttgattctaagatttgacccttgcttcagtcctgcggtggggagattgtgggtagtcttggtccaaatcgactgcgagggaagccttggctttaaaacgaggggtgattgcccgctctaaggtcgacaccacgcttgcttaatagttgactgcgccttagttttccgtcagtcaagtaggaagaacaccccatttactgccgctccccggctctgtcccgcctggaagcctcccgcccgcagagaatcagcagagggtctcgtagcactgcctccctccagcagcttgcgccccgaccccctggtcagagttggaatgtgggctctgtagggggccgagcgaacagctctacctgggggctgtcgctgccccccttagtccgagggccttgctgtagaggcctccgctgccaatgcaggggaaccggttctctcggtttctctttccttccccagctgcatcaccgcagacgtgagcccgagcccggcccgcccagcccggcccgcaccgccccctgctctccagctctcacgccgccccccgagaaaggccctgcccctgtggcctgtccacctgccctgtgacccctacagtgtccccacgagtggctcctggagaatgcactctgagacagtgactataagtgcggagtcccagagcagggccacccaaagctctccggagtggtggtcataagccccgctcccgcccgggcttcggggtgtcagggatgggggagagcctaactaaatctgtctgcgcccctccaccaaagccatgagtcggttttctccggaagtgcatggcccctccaaactcccacactgaccacacctcttcctgccccctaaggtggcccggacccggggccaggagaccgccgcttgccgaggcagaggagcaggttccaacgggggccccagcagggctcctccgccactttgtcaagcgttcctcgacgaggaaagggtgtaaactgagtcactaagcacgctgggccccggaggcggggtcatcgagctgcccggtgctgaaccaacaaaccccaagcaggacactcccccggcgccccctccccttggaccccgcagcgcactcacgtcggctgggcgggcctcagggagcccatgggctgggtgggcggagccggcggtggctgcaggttaggcccctaccatcgccctgggcggggtttccaggggcgaggccggagaggctgcgcggaacaggagctggcaagcagagcgaagagggacagggacgctcaggagtgctgtcaccgatacccaaagcagccgtgtctgggtggggcgaggaggagcctgaatgcctctgctggggaccttggggggcattgggacgaggcccagagcagaaggccggcacctggagccgggactgctgcgtctgaaggggcactggcaggtcgcgagcggagcccaaggaggatgggaccgcccccgctccgccttccccctctattccccgcccccccaccccccaccccccgggatttgctgtccgggagtgcctgcgtccctcctgtgcgcggctctgggaatgccgggctggggctggttgtctcgtgcgggcgttcctgttcccggggaggtcatttgcaccctgaatcacccactgcgagcccttccaaccggattgcaaatccgcccgctccgggcccacctcttccctcaccagggcctttcccggagcagcccggccgggcctggaaaaactccgagcgggattcccagcgcagggacgcccaccggagctcgatgtctcgggctggataagaaggggaccggacctcggttccttccccgaccctggggaaacgcagagaaggggagggattggggaagccgggaggatccctggagcgcgacagcgcaccagtcgccaggaggtcccctgcgtccactgcccaggcgactcaagctacaggggcgtcaacgcctgggtcggcgctgggggcctgggcctgcttccctccagcccccagatggagggcagcccttcgcctaccttctcctccccgtgggatgcggcccgcgcagctcccgccccagcgcggagacaaggggagcaggcgcgcggagctcccgggtgcggacccgccacctgccgcacccttcccttcccaaccctgccctttccccacccccaccccacttcccacccccaacccccgctcggcgccccactcccgaccctgcctgcccgggcacctcggggcgtccgctcgccggcttcgcctccacttgccccggcaggcgcgcgtgggctcggcgtcccgcgctccctcctcgactgtgcggctcccgcgctgccgggtttcctgttcaacaatataaccagggaggcaccggcggagagcgccgggcagaacttcctcccggactggggctgggctgcggttgcgagagacaatccccggtgtcctggcttcctgtcccctctgggccgggccagcgcctgaggagcgaagacgccaccccctcccctgcctttcccgggatcctgggccgcacctggctgtctccagggagaaagaggctgcggggctgagatggtgggactggggagggcgggagcctcccccgcaggttcgcctggccagattgccctcccaccatcccccaccccctcttgatccttgtggggaaggagggccaccctccaatccgtccacagggtaagctcagaacaacctccaggagtccagccccagggccctccgccttgggggtcttctgttggagaattttctgcctctctggacaagcagcctcgccctgatctgagcctgcactcactccagacattacaagccacagccccagcacaccccctgccctcaggggccccaaggaacagttgtgcctgtggacctggctgtgtgtgccaagagctggctgattcaggccagtgttctgggaggaagaagggcccgcatcccaggccatggcctctcttgacaccacctcctggggacccagggttgggtgggaagctgaatctggccacccagattcagaggaactcccttacctctatatctttgtaagatatagtaagtaaggaactcccttacctctatatctttgtaagatatagtaagtaaggaactcccttacctctatatctttgcctctgctaggcattgcccacctgtgagtccacacttcctctgagaatctgtgtgtctgagccttggtggcaccttgggaccctccagggtgggcacacagcagaactcagcactggtctttggtgcccgacatgcttagaaaatagtggctggtgccgggcacggtggctcacgcctataatcccagcactttgggaggccgaggcgggcggatcatgaggtcaggagattgagaaaccctggctaacacggtgaaaccccggctaacacggtgaaaccccgtctctactaaaaatataaaacattagccgggcgtggtggcgggagcctgtagtcccagctactccggaggctgaggcaggagaatggtgtgaacctgggaggcggagactgccgtgagccatgatcgtgccactgcacttcagcctgggcgacagagcaagactccgtctcaaaaaacaacaaccaaaaaagaaaaaaagaaaatcgtggctggaggaatcttctctccctccctaccttttaggtccctctccacctgcagcacagccaggcagtggctggcagtggtgatggtctttgcgtggggtcaggcaggtatgatgccccactctgctgcttggcggctggtaggccttgggagttctgccttatctctgcagctcagatttctttcctgtcaatgggatagtaacacccacttcactggattattgggaagattaaatgaggtccactaagcagtgcttaccacatgcccagcgcacacaatatatcagctattttttttaagacagagtctcactctgtctcccaggccgaagtgcagcggcacgatcttggctcactgcaacctccgcctccgggttcaagtggttctcctgcctcagcttcctgagtagctgggattacaggcacccgccatcatgcccagttaatttttgtatttttgtagagacggggtttcaccatgttggccaggctggtcttgaacttctgacctcagatgatccaacctcctcggcctcccaaaatgctgggattacaggtgtgagccaccatgccggggtacatcagctattatgactacttacattatatgataagctcttgggggttggattggaatctccaaaccacctgtcctccttcagagagaagaggaaaaggggaagtctcagctactcaggaggctgaggcaggagaattgcttgaacccgggaagtggaggttgcagtgagccaagatcacgccactgcactccagcctgggcattggagtgagactgtatccaaaaaaaaaaaaaaaaaaaagggaggggagaaggggaaacaagtggcctcaggggcgctttgctgaggctggagagggcctgaacccaccggcagggcagcaccaggtcacgtgctgtggccctcctctgggcctccctctcccagtttctcttctcttctccgggcctaccatctactgtcctggagggaggtgaagcccttgggggaagctggggcacctagattggcagagggtgccaccttgtaatctgaaaggggcctttaaggacaggaaatctcagacctgaatgttgtctgtttccatcccattttactgcaacctgatttccctgagaattaagtctgtttcctgctcctgttcttaaaatggacagtggtgtgggcctccccttggaggggtcccctgggcttctcctggaacttctgaggaaggtcagcagccaagtaaaagtcattttgagccctaaaaccatgagccctgaatcgggggatccacttaaataacccttctttcctgagccccatctctcctttatttctcctctgagaaatgtcccctgtatcctgaggtttcacatgatccagtgtcaagggtctgtgttttgacatttaagtcacaggaaaagaagccaccggcgtgggatcagcttgagttgttatacaagtgtgggtacacctccccagagaccctgagatcctaccccaggaagagcctgactgctgggcttggcaaggtggttttcttactctcttctccctgcccactcctggcatgcaagccctctgcctacaagtgtttgccacggacctcccaagccttcccccgtgccagggactaacatgagggtaggggaccctgacagatggtaacagatggctggtggtctcccccctggccgtggcagtgttagaattcagaagccagaccagtgatgagaaagatcaggtctttactgcaaaatcattcaaaactcacacggcagcaattccttcaatacattgcaaagactcctcagggccagagccctgctcactaggaacagtgtattgcataaaataacattttaaaaatagtgtgggcactacctttctgagggaggggaggcgggaagagtcaatgcatctgaaagcactggcagcttctggggaacgggccccccagggcctcaaacctgctgcctccgagggcaccttcggggagaatcctcacaggcccaagccctccccaggccaggctcctgcccactcagggatggggcaatgagggctctgactaggctgggcttgtggtggagcgttaatgtgggccatggcggtgcataacccagctcctggcttaggaggcattggcgtctgggcacaggtgtgtgccatgaccgggagaagctgtgcgcagcctccacctgcctgccaccgttgcctctgttctgctgcacaggcatccagctccaaggctgggtgggtgactcagcagctaatcgcccccagggaagggtgggggtgggctcatctctgacagtgacatgcggctctccacctgaggcctgactccaagctgagcgcaggtaagacagctaggactgagggcctgctaggtccaggagaggtgggggaaggcgacagagagaccagcaaacccacatttccccgaagcctggagggtctgaccatcactttgaaaacaattccagactcccaccccagccccaaggccccttcaaaggcagtcctgctccggggaacttcttcagtctccagtgtcccggctgggcaagttcagtgatgctttgggaattcatggctttgtgaggtggtggctgcatccacagggcagttcccccgcacgccctgcacagcttaggaccaggtcacttctccacagtgcagggcgtggctgcctgccctctctggggtcctgcctatctgtgccctggcaggggtcagtcaggcagagagtgtgaccccgggcacccaccaaggtgggcctggagcatctgcagcagcgcccctgtctgtagaggggtgaggagcgcacggggatcgggggtgggcaagacggcgaccctccataaaccgaggagggctcaaagtgctgacagtgctggtttccagtcatttctccttctcctaatggggccaaggccccaggctagagaagagctaggggctctgacgctgagaaagcggtgggctcagcaggcgagacgcactggggtggggagtaaagaggacacagaggaaccggggtcgccaggactggccctgccctgctgaggggcggtttggcactggcagtgagggccaaggaaaggcactgggtgggcccatagaccctgtcccagcagtggcctgcccaccagccacccgctacctctaagccaggcctgagtggctcctgtgcatccgctgggggtgagaatgtctggatttcatgggtgactcacgtagggtcaagaataaaaaaatactttctgttgaaatatgaatgggaaaaacccaccttaaaaaactagaccttttaatcaggaatgtggaattgaaaatgctccccaagtcccctttccacagtgtttgggcagccctaacggaggcgccgggacgctggtgagccagggcctggtgagtaaacggccctgcctgccccagacagggagcatctggtggtggccacgcctcctgcagcagaggggtggggggagggccaggggacaccacggggacttcctgggctttctctgggaggccggtgctctggccacatctgagggtcttcctgacaaggggacacagctgtgacacggtgagtatcctgggctgatggcaaacccagccgggatggctgagccacactcacccccggctttcagagcggggtcagcagatgggcatcaggcgaaaatgttctgttcctggtacttgcgccggcgggcacagcgggggcagcccttcttcaccacagcctggcagctctggtggaagacggtcttgcactcggcacacctggggagagagcagtaggcctgctggtgccggctgggctggaggttgccctgtggccacgctggccagcccttttgaccagaacccacgatacggctgtgatgtactgtgtaacccatgcacgcacaccgtgcctctccgttctggaacaggagagtcttgaaacagtgcttacccatacgtcacacaatgcacactgatattctctgtcctattgcattttttataaatgctgcttgagattcattaaagatctcttgcctatatttaaaaaatatttacggccaggcgcagtggctcacgcctttaatcccagcactttgggaggccgaggtgggcgggtcacaaggtcaggagatcgagaccatcctggctaacacagtgaaaccctgtctctactaaaaatacaaaaattagccgggcgtggcggtgtgtgcctgtagccccagctgctggggaggctgaggcaggagaatggcatgaacccgggaggcagagcttgcagtgagccgagactgcaccattgcactccagcctgggcgacagagcaagactccatctcaaaaagaaaaaaaaaattttttttacttactttatttatttatttttcagagtcttgctctgttgcccaggctggagtgcagtggcacgatctcggctcactgcaacctctgcctcccgaattcaagtgattcccctgcctcagcctcccaagtagctgggattacaggtgcccaccaccacacctggcttacttttgtgtttttagtggagacggggtttcaccatgttggccaggctggtcttgaactcctgacctcaagtgatccacctgccttggcctcccaaagttgtgggattacaggcgtgagccaccacgcccggccaagatggtataattttaaaaactcagccccaggcccattcagggctgcatcccggccagtggacaccgacagaaaaagaactaatgttcccagttcagttttctgctcccacatgggttgcaggaaggtctggacaaatttttccattgagaggttgcggataatgagcaataactgggaacaagagtgatcatttcagcaacagacacagtggcagtggcaggtaccacccaccaggtgccactttgtgcctggtctcatgccaacagtgcagggtggtaactcatacaaccctcctcaacccatgcatacactgaggcgccaggaggctccactcagagagccggcagccacctcttctttaggaagagagatggttccatagaggcagaggagtcctgggaaagcttgtcttgtcccctgagctggactggagctggccatgactgcccagagcatgggctgccccaacaactgcaccaccccttggcacagcacaaagtggatgttcaataagttcctgcccacagagcgaagcctgctgccctgcgtgcttgggccaggctgtgggtgtggggaagggtggggctggaaggcggctggctgggtgtcccgcatacctgactgtggtgtcaaactcaaaggggaagatgatgtcgtggtgctggcagatctggcagatgaagccgcgctgggtgcacaggtcgcagtggtagacatgctgggaggcaaattcaatcagggccttgaggaatccttcatacaccccgtctgcgatctgcggagggcaagtaggaatccttcatacaccccgtctgcgatctgcggagggctggtaaactgaggccccaggcctttcaagcagctgcactgaggtgccatggcaccctgcctggagaacttctaccccccgtttccacacgggcaagaaaagaaaacctccctgaatcaggctgagcaatgccagcgtccagcccgtgggcactgaggtcactgggggctaatgggatttatagctgagacccaaattcactgtaccctccccttggggaaaggagtattccaaactctcttccctgtgatcctggggttgctggagtgcttgtttattccaggggtgctgggggtatccgtccctgcccaggaagctggggcagcagggcaacccaccctgagctgcagaaaagctacagactgctgtcttcttcagtaaactacagacaccccctcttccatcttccttgctgacttctctgggaatgaagtctctctagaggtctgggcgggggaagcatgacactcttacctgttggaggtcagcaacactgaacctatgcggagattccaagagataattcctgtggttgagccttcaaacaaaacacaagcgattctttagaaaggtttccagaacccaggctagcctgtgttgtttgtttacactcccctggcgctgctcaccaggcagacaccccccgcctgggcggggcaggggctaggagtgtaattcggcctgcctgggcttggggcctggtcttcaacgtaactaactagctggtgggaccttgggcacgttacttaacctctctgaaccttgggtttccctctctgggaaatggagttgtctggattaagtaacttatttaaagcatttggcttggtgccaagctcacagtaaacacgtaattaatcatgagaaggaggatgggtgcagacacctgggaccaggaactgggctaagagcttcatacgcattcattcatttgatcctcacaataattctgtgaggctggtactatcacaatcccaactctgagaagaggaaacagagaggttaaatcacttgcctgaggtcacacagctagtaggtgggagagctggagtttgaacacaggggcctggctccagagcctgcacccctgtccacctagcaaatgcctagagatgcaggctgttgtcattattgccaccattacataccagggacagtgctggggacagcaatgcacaggatatggcctctgccctcctgtggcccctggtttggccgagggacagacattcaagtgtctggtttcagtgctacactggtttcagtgctgagacgtgtcctaagcacagcagatcccatttcagaggtggccgggggagcagagaacaagggctcagccgccaacgcagctctagtttctaccacaccaatgggagggatccagggggccccatcctgatggggaggaaacacctgcagaaagtcccttagtgcaaaacctgcctggcctggctgtgtgtgtttacatgggtactgggggtgggaggttactccaagtcagaggatgcttgggaacctgccccaggatgccccagacatctggggacaggatggtgccagccctgggtctgggcctccggggtgcaaactgtggagcatctggaatgggggcttggccttgtcccagctggtggctcagctgtggtccaggggagcccaatccggggtggagagggtgagtctcaccaagcagccacacaggccaagatgccaactggcccctcagtttaccatgctggtgtccccagtaaacttcctgcactctaggaagggaagctgccatttgtcaccaagaaaacatgggacacagcaggctggggggacacaggttggccttcagctggcaggagggtgggcggatctggatggagaattagctttgccatctgtcctctgaccacagtcgtggaagccctgggagcccctgtgccctgggcctgtcaccctctcagcaaggacttggaagtggcttctccgcagtgctcagtcaaggccagaggggagagggcgctgacccaggggtgagaggccacttctcctggcctccaggagagaaactctcatgcactggggcacagtcaggcctacttggggcctcagtttctccacccacacaatgaggagaaccctctttgtcctctggcgtgaggctggctacctgggaaagagaccagaggaatctggacggctctccgggagagaagaagatgaggggaaaggtcgaatcttagttcctggaaccgatgaagtgatggggaaggaaagggccaggcaagggctggaagatccgggggacatgggtggggggcctgggtgccacctgtctcctgagccctggctcctcctctgcccaccccttcccggctgtcgggagggacaatgaggtctggtgggtggacagggtgtggggcatttctgtgatggcttcctcccaagggctggagaggacactgtcaggggcttctctggcccttggagacatgtcccaggtctgccggagagaaccctgccaggcagctgccactagtgcaggacagctcctccctgactccctgacatccaagaccttcccatgtctcagccctctcctctcaaccttccctctggctgactcggtccaggcccagctccctgggctaattactaacaccagctgccacccagggctctccccttcaccaactgcactccactggggccagaatggtctttttgtgtgtttgttttgtgtttttgagacagagtctcactctgtctcccagcctggagtgcagtggcgtgatcttggctcactccaacctctgcctcctgggttcaagtgattctcctgcctcagcctccctagtagctgggattacaggtgcctgccaccacgcccggctaattttgtacttttagtagagacggggtttcactatgttggccaggctggtctcaaaatcctgaccgtaggtgatccaaccaccttggcctcccaaagtgctgggattacaggcatgagccaccgcacctggtcttttcagagtggtcttttctaagccgctgaccggaagtgacagccctatgctcaaaacccttcaatggttccccacaggtggcagatcaaatccaaaggcctcgagggccctttgagttctgggccctgcacctgaagcccagctgcccagagcccctcaagggtgtcagtgagctgtgctcctgccagcctcttgctaccggtctcttagccaggaaagccaggttctcctctgccctttctactcttttctcatttttctaagccccagttcaacagacacacaatgccactggtgtggcaacatgtgtgtgtggatggagtgaggtgcagaaacaggtggtggtgggctctgagaagggctgattgaatggtctgctttattccctttcataaattttcctcgcttggaagattgacctttgtaaagaagaaaaacattttagaaggaaaaaggaaaatatctctgcatgccctcagctcagatgccatctcctctgggagctcctctggcccctgccaaggctggatcaggtgccctcagggcacacacgatgctgacccagggccatctgtggcccagactctgggtccctcatgcagctctcaccactgctcaggaggccacaggaacagaggaatcactggcccattttatagacgggaaagctggacccggagaagtgaagcaactttcctgactcacagtgggtgagggcctcccacactctttcccctgccccatgctgtttccatgggacttccacaggcatgggaagcaggctgagcgcctagcaggagtacagcgctgctgcccagggatggagcaggagggtcagggagagagacagggctgcccctggtgcccacagagacaggtctgtaaagccgatgaacagactctctcagcagggtggggatgggtgaatggggctggggtccacaacccaccccacaggcatctggtctacacaggtctgcatgcctgtgcaggtacctggctccttgaccaaggagggtgataaggccccacctgaccccagagatttcaccacctggttaggtgggcaggaggatagtctctctggagccctgggtcatggactctcagaggtagggagtaagtcagcgcttgccaagaggtggagacccagtcacccacgatgcttgggatgggcagagcctcctggggtgaagtcttctagggtctagggtcccacatggtggtccctggaaggctttctgttcttccaggccctacagaggagaccaaggctcagctggcagctgtggggccaaattctcctctctgcctaggggagagccccctgcagtaccccttgagagcccctggggacctgctcgaggcacaccctggccctgaggaggcccggctctgggagcactgcagccaggatggaggaggcagtcttcagagaggcgctctctgggccagccctgtggggagggaaggccagacgggggaacctggaggggcttgtgaactggtccctgcccccagaaacccagcagaggttgatttgaagcccattctgggcagtaggcaccggcaggcttctccgcctgaggtctgccctcctgagggtgctgggagagtacagccctgggaagactgcagcctgggcgtgacctgaggactaggaagcgtttatgacaggcatggagaggcctaagtccctgttgaagcccagcatcacatcccattcctgagcaccaaaggccccaggccctgggtaagagaagcttcctgaagggcatcctgagggccccgcccggatcacgtcttctttggagaatttcaggagggaggctggcatgggccagacgactggctggtacagggaagagatgggaacatctggccctcacctgcctctcgccacactccccacttccctcctcactgtagccaaagttctccctgggctttccaccaacggtgccttcgttcatggcctgtgcgtgccattccttctgtctagaatgctctttccccctttgcttctcctttctgattcttcctaatttttcaagtctcaccttataagtcacttcctccaggaagtccttcctgctttgtcctcctctgatctgggctggatgtcaagcctctgtggttccaggacgtcctgcctctcaccctcacccccagatggagttgctggctttcccacctgtctccctctcaccctcacccccggatggagttgctggctttcccacctgtctccctctcaccctcacccccggatggagttgctggctttcctacttgtcttccctgccaggccagagacttccggcgggtcggccctggctctgtcctgctcattgttggagcctacatgcctcgccaggtgtgcagtgcttagtatgttctcagtccatgtttttgagtgaacaaatagatacatgaacaaaaccccaaaatcacccccaaaagatgtgatcatttcgcaggcccagtgggaagatctctgcccaggtttcctccaggtggacgccttgccctgggcactgcccctgtgtgtgtgtgcatgtgcacgagtgcctgcatgtgtgtacatttgtgcacatgtgcatgggtgtggatgtctatgcatttgtgtataaatttatgtgtgtgggtatgtgtgcacatgtgtatgtgtgtctgtgtgtacatgtgcatataagtatgtgtttgtgtgcatgcatgtgcgtgtgtacgtgcactcacacgcatacacgtagaggttgctcacctcttgctgagctccttcagggcgccactccggcacaggcccaggtaatcccccaggagcttcagctgctcccgtctcctcccaatgaggtgcatccgctccacatgctcgtacagagacgcgttcaccatctgcaggttgatgaggggctgggcccggatctgtgtcagaaacttcagggcctgcctgcagatctgggggtaccaccaggcattggggatgggaaggaatggctgttcagtgagcactgcctggccaggtgccacatgacctgctcacttacctgaggggctatcttcattttacagatggggaaactgaggctcaaggagatgaagagatttggctagggtcacccagcttgtaaatggtacagtcaagctctgaacccagtttatctgactcccaaacccgctctccctctaatgacaagggtcactgccccctccccaatcatgctgagatgagggagggactgctctgataacgccccctccctctgggcctcacagatccttcccactctttcctgtcctcccagcccctatttccccccactgaaggaaacaggcactcccttctgtgccctgactcaggaaccaggtgacgggctgagtcaggctccagccacaggaagctacagatcagacacagctcaccaacaggcttccctgagctccctcggctcacaccagtagcaacaccgggactccgtgtgcagctgagtgatccatctcagtctctcctggctgacagggtgttgaaggttctacccttggccctgatcctaataccaatgccaataatcgagcgcctactatttgcaaaacactgggtcaggaacttgaccacatcctcccgtcattctcagaacaacacgttagggagggtgtccctgtccccgttttctagataaggaaacggaggcttagaggggctaacgtagcttatacaacctgcctgcagaacctgccaggtttgagctgaggtgtcatctctgaacaccaggctgctgcactaatcagaagccccctcccctgcagtgatctcgctgtatcataaggacggaggagctgttgtctccacagccgacaagtgcacagtgactagaagtctggctttggcctggctcagatctttaacatcttaactagtcctctcgttacatattttatttctggtggctttgtttttgatactattataagtgattatcttttaaaatagtaatttgtttgctgatatatagaaatgaaattgatttatttgactgtcgtatccagcaaccttttcaaattctgataaattgtgtaggggaaaaaaagtctggcttcggagtcagaatggaattgaatcctgcctccaccactttatacctgtatgaattggtgaaacttatccctctctgtgactcagtttcctcatctgtaaaatggggaaaatgagagcaattaaggctcacgggtttggggccttttcgttcgctgctgctgctttagtgctttggcccggcactcggcaggatgtcagcccaggactggagcttctttttcatgggattattttgaattcagattaaaagaggtattccaggagagctcctggcatagggcctggcaggtggcacatccccagtaaatgtgagctgctatcagctgctgtgtgagtgcctggtgtggccctgttgtccccttgagggttgggggactaaactggccctcaggagacctgcccctgtatttgggggctgagggggcctctgacctcttgtctcccagctccaccagcatctctcacctcccccagcaatggacaacctcttcttttcccaaagcctggggccctgaggtaccagccccccagcccagggacagcccaatggcaaactcctggtgacttgggtcaagctgctgttctccagtcctaactcagctcttcccatgacttggccccaggccttgggtgaggctccagtgaaataacacacaggaatgtgcgctgaacactgccaaacactgcagatgggcaggggctttgtgctccccagcgactgttcctatcctgcgggaatggaggagacagaaagaagccccactcctgggctgacatcctgccagtgccagccaggcctcagcaccagtgggtcagccaggcctcagcaccagtgggtcagccagaacagcaacggcgaacaataaggccccaaacccgtgggccccctactttctatcttgagtttccctgtctttcctaggccagcaatctttgagagggagagcgagctgaggatttcctgatctcagatatgcctagaaaacgattgtacttttcttttttttttttttgaggtggggtttcgctcttgttgcccaggctggagtgcaatggcgcaatctcagctcaccacaatatccgcctcccaggttcaagagatcctcctacctcagcctccggattagctggattacaaacatgcgccaccacgcccagctaatttttgtattttttagtagagacagggtttctccacgttggtcaggctggtctcaactcccgacctcaggtgatccgcccacctcagcctcccaaagtgctgggattacaggcatgagccgctgtgcccagctaggattgtacttttctagttagaaaaggaagtggcacaaggatgagggcagtgaataaggagatggctcaacggaagtatcagggtcctgtaaatagttaacgtgttttatgatcaaagggttctttgcatttttggtgattttgaggcttaatttcctctatgtagttagttaaatatttaacactgagagcgagggcggggacaaggcaaacaacaaaaaaatcaaaatgaagccaacttctgcggggtttccccgccccagggaggtggaggttgaggtagaactgactgagagaatcaccctgcactatgatgaagacacatccacacatcaggactacatagctggcaggccctggctctccagaggagcaaacagcttcttccttgtgtttctgtgtctgtcttagtagaaatctgtgcccttggaagaaaaccaaatttgcaccccttgaggcagacactaaccaagtgaattaggtagatgggtggatgggtgggtgaatataggcaggaggtgtgacaggccccagggagagaaaggacactgttcttactgacaggcacacactgccacacctgccctcccaacaaccccgacacagacactgttgttaaccctccttttacagatgaggaaactgaagctaatttgctcatggtaacacaggtaggaaagtggctaagttcagctggagaaaaggaaaattctgaaagactttaagatacatcttattcaaaagcatttggtgaacataaaaaagtacccaaggcataatattaagtgaaccaagcttcttataaagcagtatgagtcctgtgtgatcccaactttataaaaaatagatgcatatgtcaataaatgcacagaaaagggtataccccgaaatgttaataatggtgatctcttggttatgacacagaattttgattggtctttgggtttttctgtaactttaaaatgttaaacaataactgtgtattatcttaataatgggggaagtcacagaaaaagtgcttttcaaaaacatgaaataaataagcccatgtagggcctacaggggagtgcagtcacctgggcctcatagggttggcaaaggcaaggatgactgctccaaggtatagccctggccagcccatctacccatccacctacctattcacccatccacccagccatctacccaccgtccacccatctacccatctacctacccatctacccattcacctaaccatctacccatctagccatctgcccattcacccacccatctacccatctacctacccatctacccattcacctaaccatctacccatctagccatctgcccattcacccacctatctacctatctacctacccatccacctacccaccaagccatccactcatccacctaaccatttacccatctgcctatctaggcacccatctacctacctatccacccattcaccaatctacccaaccacctacccatccatccatccaccaacccatccacctagccacctgctcattcacctacctacctacccatccacctaaccatccacctagccacctgctcatccacctacctacctgcccatccacctagccacctgctcattcacctacttacctacccatccacctacctacctgcccatccacctagccacctgctcattcacctacctacctacccatccacctagccacctgctcagccacctacctacctgcccatccacctagccacctgctcattcacctacctacctatccatccacctaaccatccacctagccacctgttcatccacctaactacctgcccatccacccatccacctacccatccacccacccacctagccaccacctgctcattcacctacctacctacccatccacctaaccatctgctcatccacctacctacctacccatccacctaaccatctgctcatccacctaaccatccacctaaccacctgctcattcacctacctacctacccatccacctagccgcctgctcatccacctagccacctgctcattcacctacctacctatccatccacctaaccatccacctagccacctgctcatccacctacctacctgcccagccccctaaccatccacctagccacctgctcatccacctacctacctgaccatccaccatccatctatctaatctatcaaatctattttatctatctatctatcatttatctgctggtgccttaagcagttatgtttgtagctgcaggaaaccatcctcaaactctttcctcctggggaccaagacagccaccgatagagccctgcccaaggctgtggacaggcaccaagcttttctcttggttagctccccaacatcacagtgcctgaaccagtgaccctggcttcccttgtttagaggagccaaactcctctaaacagatgaacagcagcagcaaagaggagtgaacacccctctgtccctcagcagctgggctgctgggcttgagacttaccgggcgcttggtgaggtcccagttgtggatgatcctggccggaatcactgaggcatcgtcttggtggcagatgtcacagtaatagaggccagagaaggcacagagcttgggtcgtacaaaggagaagccgatctgccgggagcagcctggggagatgggtggagagtgagtggtgtggccagagtcagctcctagtaacttgggagctgctgtggtggaaaggatctgctggttgatttttttttaaggtaggcacaaacacaagaataaccaccactcgtatttccaccactcagaactcccctactaattaatctttacaacaacacactgtaagaactatcattattttacagctgaagaaatggatgctcagagaggttaggaaatctgtctggtcacatagtgatgaagtggcatggctggcattcagatctgggtttggctggttccagagcctgagttctgctccactaccccttgctgcctgtgtccggtgtccccactgctggcttggcaatgccagcctcctctaggtccacccctccactcgggccccagaatggaagcagcagagtaggggctgtggcaagcagcgaagtagctgggggacagggaccagggtcggggctggcaacagggagcggatgggcagccagcagggggcaggggagtgtgcacagtgtctgatgcctcgggactgtggggtagggctggcttcagcccccttggttggaggtgtctccacagccggagccagtgggaatgggagtgggatgtgccctgggcaaaaagcagaggccctgactcaaaccctgaacatgtgccctaactcctccaagggcaggcagaagggtccccgggccttgggaccagagggcgggttctgctcctcaccagctgcctcaccctgaccttcacctgatttcttcaaggttccatttcagtgactgtaaaattcagctactaccagctattttgtggggttattacaaagcttaaatgagacaaggttctgcaagtaccctgcaaattatgaaatacaacccagatgccagtggttggtgtctgccactgagccatgcctgctgggtagaaaggaaacccaaactccccggtggcacagtcccacccgctggtgggtggcagccatggtgagagttgcccccgcagcattcacacccacaggcgaggaaccctttcttgcaagccctggagtcctggccccctcagagcctggccttcacaggctgaagagcaaagtgtgagcgctggggcaggcgggggagaggtcaagcgaggcttgcaggtgttttctgcaggaagctctgttctgcctagcttctcccatcctcgcggggccaaccgcagaccaattcctttcagatgcttgaaacaggcttccctccagtctgtgccaacaggacagctcccaaaccaaggctcagcttcttgctctggccttctgcagcaggacaaccccctcacaggtcacctaagggtcccatggtgatgggatgccatctgcccctggatggtggggggagtgggaggggctaacaatggaacatgggcagggggatgtcactcaaccttgaataagaccctagagggatgccctctagggtcctgcctatgagcaaaggctctggggcctgactgtcagggtcccatttctgcctctggccaggcatggttgctgatatctgtaatcccagcactttgggaggctgaagcaggaggaacacttgagcctaggagttcaagactagcttgagcaacagggggagaccccatctctactaaaacaaacaaacaaacaaacaaaaaaggaaaattctgcctctgccacttactagctgtgtgagctcagtagcagacaccaaccaggtacttaccagctctgtgcttcagtttcctcccctatcaacagagatgataatagtagcgcctatctctacagggttgttatgagacttaaatgagataatccaaataaagcagctggcccagtgcccagcacagaagtattagatttgatgatgaggaagacatagcagatgtactgacttggaataacatccacagtgtaggaaaaaaccaagttgtggaacaatatatccagcattcaacacagcagccaagagccccgtgtgtcccctttaaatgcaaatgaatttaaatagaaaattcagttgcttaaccacactagccacactttaagcacctggtagcactacatggctcgcagctatggcactggacacacagatctaggacattttcatcatcacagaaagttctattggacagcactgaatagcacgagcccatttttataattaaaaaaaagggtgtacacttataaaagcagcagaaatatttggaaggaaaccatgcccctgctctgaaagaacaggacggtagagcaagaagaaaatgaagcaggctgggactccctgagcagcgcagtgagtagccagcctgccgcccatcagtgggaggtggcaggagagggacgggtgagcagggcccactgcctatgagcagggcactggccccagccggggctggggaggagcagaagctgtagggcaagcctgatctgtggcctcatccctaggggaaggatgggggcatttgcggggaggcagaagggtggggagcctaaatcaggaaccagcaggaggtggagtgaggctggcaggctgggggtggcagcagagcaaatcggcacctgcgcagaagcagccttgggagtcaaggcctttctccatggggatagccaccaggtactgcagcaggaagccattctcccgggtggcaaatttcagcacctcctgacagttttcatccaggctcccgcccagggtcaccgcctcctcggctgtctccaagtaggatgccaggactttgcggaccagatccctccacagggcggcttcctcggcgtttccggcctgcagcttcaggacagccttggccgtgatgattttgaagaaggatgggcccccaaggctggtgtctggcaggatgtcccggatggtctccacgccgtggctgtcactcagcatcttctcattgttcctgatgcggaaacatttcagagcctccaaggacagagaaaatatatagggcatccaggtcctgtccatgtacaagtacagcagggactccttgatggcatctggctctggaacctgggcggacgaccagtcaaactgtgtgccctggagggccgcgggctccgagagcaggtctgagggagagaggcagccctggggcgcctcggggggttcctcaggctggtctgggtactgcacgttcacccactcatcctcctgctgaggccggaccttctgcagggcctcccgcacccggtccagccagtcctcagcttcgtcctgggaggaggcgcgcagggccagcttcttgccagagaagaccagctcaaagcgcccatcactatgggctggccccacagactcacagcgaagcagcgagcagttctccacacaggtgtgctcctcgttgctcaggtagaggcggaactccagcggggagagctcgcagaagagctccttccagatgcccattgccccccgccgctccacggtgcccagcttcatgagaccccggaatgggttggacagtcctggaggcagaggcaaaaaggggcacattagttggcgggcctgtctctgtcctgcccaaggcagcctctgctgcctgatgccctgcagtgcatgtggccagtgactgtccccagaacacaggccagccacggggcactatcacatgggaccctgaaagctggatgggaacatccccattctcaccgtccactgctgctcttgcgtcctgtatttcactgagaaaataagagcacccaaaagatcccctccacacgccctgttccctacacccacgccttccctcctgctgccagggatgaaccaagtgtgcttctttctgcgtgaggccaaaccctccatttgtgcaggaggtctctcccttggccaactactcaaggacaaggagcagtcctctcctctgtcactgctttcttccttctctatggggtgactcccatcggcacacatgcacgctgtcatttctcccatctttagaaacacctctcgtctccatgcacttccctaatgaccaccatatttctcaggcccctttacagaaaacctgtttgaagaggcatcaaaactgttcatcttggccggaagcggtggctcatgcctgtaatcccagcacttcgggaggctgaggtgggtggatcacttgaggtcaggagtttgagaccagcttggtgaacacggtgaaaccccgtctctactaaaaatacaaaaattagccaggtgtggtgagcacctgtaatcccagctactagggaggctgaggcaggagaatggcttgaaccgggaaggcaggggattgcagtgagctgaggtcactccactgcacttcagcctgggtgacagaggagtgagactccgtctcaacaaaacaaaaaacctcttggtctctagtttccctgctcccattccttctcgaacctgctccaagtaggcttctctccccccattctactgacactgtttctgagatggtcaatgccctcctcgttgccaaaccccaaggccactcctcagccctcgcccccacccttctatctctctggctcggtcctccctgtggcctctcacgttagagtgcccagatgtcagtcctgggtccttgtctcctctctgtagatgccactttctcaccactctacctgctctcaggctttagctcccaatttttatcgccagcctggaccttgttcttgaaatccacattcatatatccacctgtgccatacatgtccactaggatctcagctgacatgtccaggatgaattcctgctgccagcctgcttcctcctgaatggtcctcatctcaccaaatagcaaaattcatccttccagatgcctgggctaaaaatcttggtgttaccccaggttttctttctttcgcagcctacatcagcaaatcccattggctctgccttccacacatccggaatccccgcctctccccagctgcaccccacccactgtcatctctggcctggcttgtgatgacaacctcctaactggtctttctccccttctcccctgtagtccctcagcgtaggagccatgatgacccatttaaagggaagtcagagcatgtccctctgccccaaaactccacagtggcggccatctcccttagctgaagccaaagtgcttccagtggcccacaggcctcgtcagattgacctcatcgctcactgccacgcccccatctcctctctcctgccactctggtctccactgtccctggatgtgtcaagcgcagccccagcgcagggtctttgcatttgttctccttgcttgaaacacgtacattgcctcatgactccttccctctctccccttgcatctcctcaaacatccccttattggtgagggcttttctggccatcctatatgcagtggtccactctctacctctgtagacaggtagagatttactgtcctccatagcacttatgaccacctgaccacacactatgcttacttgttaattttatttcccgtctcctctactagaatctaaatcccatgaagacagggacactgctttgctgcctgctatgtctccagcacttagaacagtgcctggcacatcacagagcctcaataatatttgctgaatgaatgagcaggtgagtgcctatgtatcacatgttgcccacagctccctgctgcctggggtgtgacaacaaccagggtgtccaaaggacacacaattctctctccgccagcctggaatagccttggagatttcacactattctatgggggttccctgcccctcaagaaacctgatggcctagacctgaagcacagcttcgctggcaggttagagaccacagccatcacacgggccaacagacaaacctaacagaagccagcccggagaccgggctctacccacacaacccatgccagggctacccacagcaaggccccctgagctgggcaggattctctgctgggtcactgcagacagaaaatgaggagagaaagagaccaattctagagcgtactttttttgtttgttttgaagaggaaacccatcatgaaggttactgaaaaatttggttatggttatttaaggctttctggaatttcagtgtgtggagatcaagctgaccttgctgtaaaaagcactggggaggtcgggcatagtggctcacacctgtaatcccagcacttttggaggccaaggtgggtggatcacatgaggccaagagttcagaccagtgtggccaacatggcaaaatcctatgtccactggaaatacaagaatcacctgggtgtggcagtgcatgtctgtaatcccagctcctggagagactgaggcacttgagctgggaggcaaaggctgcagtgagctgagattataccactgtactccagcctgggtgacagagcaagactctgcctcagaaaaaaaaaaaaaaaaaaaaagaagcactggaggacattaaacaaatagcagatcctccagcctggccaacatagcaaaacaccatctttattaaaaatgcaaaaattggccaggcgcagtggctcatgcctgtaatcccagcactttaggaggccgaggcggggtggatcaccggaggtcgggagttggagaccagcctaaccaatttcgagaaaccccgtctctactaatacaaaatgagccaggcatggtggctcatgcctgtaatcccaactactcgggtggctaaagcagaagaattgcttgaacacgggaggcggaggttgtggtgagctgagatcacatgattgcactccagcctgggcaacaaaagggaaactccacctcaaaaaaaaaaaaaaattagccaggtgtggtggcaggtacctgtaatcccagctatttgggaggctgagacaggagaattgcttgaacccaggaggctgaggttgcagtgagcagagatcatgccactgcactccagcctgggcaacaaagggagactccatctcaaaacaaacaaacaaacaaaacaaatagcagatttgatcaagccacccagagctgttacataaaccaactactgagggtaaacacgtttggaaggaccatttaaaacacctggggcttcatggggccggatgtgctctgagctacaggtggaatcaagagttttctataatcataaattgcatagttttcagggaaaatattttcctatttgactggtgaaacagtatttttgtcctctgtaggcagttttgagacaatatactacttttcctgaaatgcttccctgaatgaacatgattatgatggcattctggaatgaggttttataacacttgtgggaacacactacccctttagcaatggaaaacagaacttcacagctgccttctgaaaggcctggtccctgcagatgggacccacccgggaccctcctggtaacctacccatctgtctccggtgtaccacccggaagctcttatgcccctgggatggggctgcctgggcttgccttcttcctggggaaggtacacacgcttggtctaacgcccccagggagcagttttttcttggttcttgagaaaaatgcctgtggagaccaggccttgaccctggagtccccctgtaagaagctattgggtggtctgaagcactctccaggggttgctcccgggaaggccggtagaagtcatcctctgagatccagctcttgtttttctgttgggaaagaagacaacagttgtttgttttaaagtttttttgttttgagacggagtctcgctctgttgcccaggctggagtgcaatcgcgcaacctcggctcactgcaacctctgactcctgggttcaagcgattctcctgccccagtctcctgagtagctgggattacaggcgcccaccaccatgcccagctaatttttgtatttttagtagaggcggggtttcaccatgttggccaggctggtctagaactcctgacttcaggtgagccacccacctcggcctcccaaagtgttgggattacaggtgtgagtcactgtgcccagcctgaagttttttttttttttaagtctttatctagatatggctcttatatcataaaattaacccacttaaagtatgtaattcggccagccatggtggctcacacctgtaatcccagcactttgggaggctgaggtgagaggatcacctgagcccaggagtttgagaccaacctgggcaacacagtgagaacccatctctacaaaaaataactagctgggtgtgatggcacacacctgtagtctcagctactgaggaggctgaagcgggagaatcgcttgagccagggaggtcaaggctgcagtgagccgtgatcacgccactgccctccagcctggttgcagcctaggcaacagaatgagaccccatctctaaaaaaataaataaataaagtgtccaattcaaacattttggcttagtcagagttgggcaatcgtcaccaccatctaagtttagcaaattttcctcacccaaaaaggaaaccccgtacccattagccgtcatccccatttcccctggccactctcagctctaggcacctacttacctactttcagtccctacacacctgcctgttctggacatctcatatagatggaaccatacgacacgtgaccttttgtgcctgcttctttctcttagtgggaggttttccaggtgcatccatgttatataagcatgtttaagtgttcattcctttttattgccaaataatattccattgtctcgatccaccacatttggcttatccactcctcggctgatggacatttgggttgtttctactttttgtcaattatgaatagtgctgctatgatcacttatacacaagtttttgtgtagacatgtttcattgtcttgggtatatacttaggagtagacttgctgggtcatgtgtaactctatgtttcccttcttgaggaactaccaagctgttttccaaagtggccgcaccattttatattcccaccagcaatgtacgagggttccaatttctctccttgggaaatctatccaaatccattggaatctactgaaatccattgtctgtcttaaaatggggctgtctttttgttgctgagttgtgttgtgggttgaattgtgacccccccacaaaaggacatgttgaaaccctaccccccagtacctcagaatgtgaccttttttggaaatagagtctttgcagaagtaattagttaagatgaggtcatgttggagtagaatgggctgttcatccagtatgactgatgtccttataagaggaggagaaaagatacacaaagagaggagaacaccaagtgaagacagagatacagaggaagaacttgtatgacagtagaacatgtgtgacagcagaggggagacaggagtgacatgtctacaagccaaggaatgcaaacgagcacctgcaacgccacccaggagaaaggcgggaacagattcttccttagattctccagaaggagcctccagaacgatcagagaataaataccagttttgttttgtttttgagacagaacctcactctgtcacccaggctggagtgcaatggtgcaatctcagctcactgcaacccccgcctcccaggttcaagcaattctgctgcctcggcctcccgagtagctggggttacagatgcttgccaccatgcccggctaatttttgtatttctagtagagacaaaaccttgtcggccaggctggtcttgaactcctgacctcaggtgacccacttgcctcagccttccaaagtgctgggattacaggcgtgagccactgtgcctggcctattttgttttgttttgttttgaggcagggtctcgctctttgcccagactggagtacagtggcgcaatcagggctcattgcagccttgactgcccaggctcaagcaatcctcctgctttagccccactgaatagctgagactacaggcatgcaccagcatgcccagcaaattttttatatttttagtagagatggggtttcaccatgttggccaggctggtcttgcactcctggactcaagtgatccgcccacccttgcctcccaaagtgctgaggtcacaggcatgagccacctgcccagcaatgtctgtttttgttttttgttttgttgttgttgttattgttgttgagacagagtcttgctctgtcgcccaggctggagtgcagtggcacaatcctggctcactgcaagctccgcttcccgggttcacgccattctcctgcctcagcctcctgagtagctgggactacaggtgcctgccaccacgcctggctaattttgttttgtatttttagtagagacggtgtttcaccatgttagccaggatggtctcgatctcctgacctcatgatccacccgcctcggcctcccaaagtgctgggattgcaggcatgagcgaccgcgcccagccaatgtctgttgttttaaaccaccctgtgtatggtactttgttatggtggccctagggactaattcaagttgtaaggtgctttatatattctgaatacgagacccttatcagatttacgatttgcaaataatttctcccattctgtgaggtgtcttttcattttccggatggtgtgccctctggagcacataagttgttagttttgataaagtctagtttatctatttttgttgttgtttttgtgcttctggtgttgcatcttaaaaaaccattgcctaagtcagtatcacagatttacttctgtgttttctgccaagagctgtatagttttagctcttacatttaggtttctggtccattttgagttagtttttgtgtaaggtgtaaggaaggggtgttattattttgcatgtgggtattcagctgtcccagcatgtagggtttctcagtcctgcttttgggtttgagatgagggagtcctggcgagcaggcctcagggtcctcattggccgcctctgtctctgccgcccacttctgtgcaggcccctgcaaccccaggcagccaggccctgccccttcccttcgttgttctcttttgaatctgaagctgctcactggctggggaagatggggttgcggggagcatctggggtgagtgggcttgtgggagtggattctggttccttttctccagtatttcaagtcctccctggcattctgtgcctcaacatggaagggcagaggcaaggaagctggctgggccactctaagtggctgtgtacacagaggaaatgagtcacacaagcagtgggaccagccccactgttttgttaagtgccactaacctcaccctgacatcgctatttccagtccctgaatcaagactgcactccctgctttgtaaacagggaagggttggtttggacagttggatccattcagatgctacacgactcctcaagccaagggtggcaagttctgactcaggcaacttgaggggtagctcacagaactaggtccccagagactcctccacggggccttcagaattggcaggtgcttcccccctgccagtgacagatgatgtgtcagtcagggcagccactggggaccatccacaacactagattctgagcaaagcctgcctaggtcatcaagaactgggggacccccctgaggaaaatgggtgggagaaacagctccctggcaaccatgtggctgtcctggcagcctcacatatacctgggaagttgtgtgatctccagcgcctggtgggagagggcactgtccctgaagactcagctcaggagacatccatcgcctctgcctggaagcttctctcacccttccccagcctccaccccttcccaccccctagctgggttagggcccctactgggatcccacaatattctgtgcttaccctcattctagcatttataaggctgtttggaatggttttcttgatatctccagcaagtgcctgcccgagtcatacaagatgagggaataaatcatgaccatcacaatgtctttaacataaaataacaaaggtgggtcaagtggactggaaggaaggagacaaatgtaaattttaagattatggacattcagaatgggcatgatggatcatgcctgtaatcccagcactttgggaggccgaggcaggaaaattgcttgaggccagaagtttgagaccagcctggccaacatggagaaaccccatctctactaaaagtacaaaaattagctgggcatggtggtgcatgcctgtaatctcagctactcgggaggctgaggcacaagaattgcttgagccttggaggcagaggttgcagtgagccgagatggatggagctattgcactcccacctgggcaacagcacaagagtctgtgtcaaaaaaaaaaaaaaaaaagtatatggacattcactggggaggacttctctctcctttgaggaaaaagactactaggaaatgttcagacacagtccattgagcacagctgccaggaaatgaaactagggaacatcttttactctcttaagcaacagggaaaaaacagtggaaatgcaggttcctcggagcttctgcacatgggcctggacagagctctgaggctgtgtgcccctggccccaggcaggtggggagcagagagagggtgtgagagagagtgcatgcatgaacaccactgtttctctcttctctcctttttttcttttagagatggagtcttactctgttgcccaggctggatcacagtggtgtgatctcggctcactgcaacatttgcctcccagtttcaagtgattctcctacctcagcctcctgagtagctgggataacaggctcacgccatcatgcccggctaatttttgtatttttagtacagacggggtttcaccatattggtcaggctggtctcaaactcccgacttcaggtgatccacctgcctcagcctcccaaagtgctgggattacaggcgtgagccactgcacccggcccccttctctccttttttcccaccaccttccgacaacctgctcactcagggtccatgtctggccagcaccccgccctttaacagtggagagaaaccatcatcgacgaaggatctataccagagctgcaactgccaccagcgacccaagacagagaaatgccaccttgcgttactaaagggctcatgacaccatatacaacagctgaatccccaagaggagtgtggctgaggagtgagacgaaggtctctgggacactttcagaaggatgagactttgtccagccagtcctcattatgccaggcaaaggaactgcctgtactcataactgtggaaggggaaccacataccatgggcaggtggtccatgggggcagtgattaagagcaagtcctagaactcacactgccttttgggagttaaactgaaacgaactcacaacccccagatcccagacatgcatcacccttgagaggcccctactccctgcacctctccttcccagtgcttagcacaagtgtaattatgatgtggataatcatttgtctaatttaatgtctgtccccaaagggcctttgtctgtcctgttgtatcactctacccctaggacctaacatggtgcttggcttatagtaggtgctttgggttcaatgaattaaaaataaatgtttttaaaagaaagactgaatgggtctctacactataaaacttgacagcgaccccaacatctcccccaaaataacatcaaataaaaagcacgtggctaactgatagaagtacagaaagatgaggaccacaggggcagacatgcagggcacagcctggcactgtccacaggccaggagcccagcaggcccacatgagctggcaggctattcagtggcacctggtgactacctactgaataagcagtgaatgaatccacaacttccctgtgagacagacacaggacgggggcaggatccgagattctcacatcggattcagcaccaagcgcttagatgtcacattccctaagcaaccttccagcaatcagagtcccctgtagctggcacagaggcagagcctgccatgatcacaccaacctgaccaccctgtccactcgatggtacacttcgatgacccactttggcctcccaaattgctaggattagaggcgtgagctatcacgcctcgcctgaacgtccataatcttaagtttcacatttgtctccttccttccagtccccttgacttatctttgttactttatattaaagacattgggatggtcatgatttattcacacatcttgtatgattctgggccaggtacttgctggagataccaagaaaaagaaccattccaaacagccttatagctaggatgggggaacaaaataaacttaggaattggcatctcaagagtctcttgggagttcaagaactattcatccatgcctactttctcccaggtacagtgcttggtgctgacaatacagaagtgaacaggcctggtgctctgtatcatagagctaatattctagtaaggaagacagaaaataaacaaggagacaaagagataatatactgtaattgcacatagtgatgagtgttataagcaaagtcaagcagatgaatgggacagagagtcactggggatggtgcttttgagctacgggggtccggtcagggaaggctgagacaacaatgaagtgagtcgggaaagaaggaacagcaaatgtaaaaccctgaggctgggccgggcacggtggctcatgcctgtaatcccagcactttgggaggccaaagtgggcagatcacttgaggccaggagtttgagaccagcctggtcaacatggtgaaaccccataattttgtaaaaatacaaaaattagctgggcatggtggtaggcatctgtaatcccagctacttgggaggctgaggcatgagaatcagttgaacttaggaggcggaggtttcagtgagctgagattgcaccactgtacttcagcctgggtgacagagtgagactctgcctcaaaaaaatttttttttttaaaagaagcctgatgttggaaggagttcgcttggactatagagctgcaaggaggccggtgggtcagagcttagtgagcaaagatgctattctgtcccaccagctttgaggccctggcaagataagatgcctgagcctgcaaagcagaagctagaccatgggcaggagtgaactcaacatgcttagtgccactctggagtcctgtggggcgcacagcctgcatccccagcagacgtcactctgcctccagcttgaggaaggggctgcagagctttcctcttcagccttcagcttgagttggcaggtgcacagtcacaaccttcagggtcctagagcattcattttcaggaagcaaatcttcaggatgtactgaagcatcttcaggatagcaaattcgaagactctgacccacactgacagttttgtgatttacatggtcatattcaagaaacagtgaggccaatcagatatccatatggaaaaatatgaggtttgacttctaacaccacacacaaaaattaatcccagaaagatcataaacctaattttgaaagataaatcactaaagcttctagaagataatataggcaaataccttcagatccttgggggagatgaatatctcttaaatgggacaaaaaccaagcaaaccataaacaaaaagactgataaactgcacatcattaaaagaacctctgttcaataaaaatactattaggaggtttaaaagtcaagccttatagactagaaaaagatacttgataaatatactatttttgtccaataaaagacttatatctgtaatatataaagagttcctacaaatcaacacatacacatacaactcaatttaagaccggaatgacaacttggacagacattctataaaagaggattgactggccaataagcaaatgaaaaggtatcatcatttagtcatcaaggatatgaaaattaaaaccactacacatctaccagagtggctaaaattaaaaagattggtaacaccattggccaggataaagagcaactagaatgctcatttgttgccaatatgagtataaattagcacaaacactttagaaaactgtttggtggtggtatctattaaaggtaaacataagccacccaaggacctagcaattccattcccaggtatatatacccacagaaataagcaccgaggttctccaaaagcatgtatgagaatgttcactacagctttcttcataatagtcaaaacctggaaacaacccaaatgtccattaacaggagaatgggtaataggttgcaatatatttttacaatggaatactgcagaacaatggaaaagaattaactacagcctcatgctatatgtacagccacacaccaccatgcccagctaatttttgtattttttgtacagatggggtctcactttgttacccaggttggtctccaactcctgggctcaagcagtcctccctcttggtctcccaaagcgctggggttacaggtgtgagccaccacacccagcccccaaatattttcattttaacttgtaatccataaaaatgagattttctattcttttatcatactaagttattgaaatccagcgcttatttcacatggcacatctccatttggacttgccacattttaagtgttcaacagccacacgtggcttgtagctgccatattggacagcacggctctaaaacctgggtcatgttgcaaagtgagtatgctcaaggcctagtattttctaaaaacattaatttaataggctgagtgcaccagctcatgcctgtaatcccagcacttcaggaggcccaggcaagaagatcgagaccagcctggccaacatgatgaaaccccatctctactaaaaacacaaaacttagccagacatggaggtgggcacctgtaatcccagctactcaggaggctgaggcaggagaattgcttgaacccaggaggcgaaggtggcagtgagcagagattgtgccactgcactccagcctgggcaacagagcaagactccatctgaaaaaaataccaaaaaccaaaaatcaaaaaatattaatttaataataacaagtactaaggaggaaatgaaggttcagagagctgaagtgacttgcccaaggccttatgctggtgagtggtagtggttaaagagctgagactgcggtcagacaagaacaaccttcacaaagtgacgtgaaaatgacaggagatacacacgggaagtgatcagcacagtgccgggcttatatctacagctcacatgccaagaaacagccgggcttatatctacagctcacatgccaagaaacatgagccccatcatcatgatgctattaacactatcactatgcagggagaggaaggctaacagggaaaaggcagagaccactcagggtcactagctggggaaaccctgtgtcagctgacatttcccaagactgccccctgaacggcttgcaccactcaccggactggtgggtgaggaaactaccagcttcagaccagctccgtcatgagcctgggccttctgcaggccattcccttggcccacttctctggctgtctcgctgacagtactagaaggctgctggcctgaggtgctctctacaggctgctgtaagtccagggggctgggcgcctggggacgcggctcctgcacgtggacaccatcttgagttccagaggctgcctgggcaggaaggggctctgcaggtgcctcacagtgcaggtatgtgctggtgttgaggccatggagggagagcgaggcctgtggtgtggggatctctgtttcttggctcagtccgttggttggcacagagtttacctgggctttgctgaattccaacaataccctagaagttttaaacaaagaaacctgtgtgacaggttgtctgcgataatgcccaaggcaactggggcagagggaagaatgcaaaactgctgttttatgatttaaaacaacccacaccctctaaatgatccactgcactccccctcacgcagtcctcctctgacactcccaccacgtttttcctggccaggatttaggcagactgcgtggacaggtgatttgtggagcctgggatctcaggcgaaaaagctccccagcagaggaagaggacttggtatgaatgaggacttactggcattctgagcaggctagctgtgggcctggagagcttgctcagccaaacacatggttgtgtgggcaatcgtttccccaaacatggtatgcagcagagcctcctcctccacagcacagggagtagagatgccaggactctgccctggggcagggactaggagaagcgagggctaggcaggtttcctaagcaaggtcatactttgttcctgtgcaggcactgggacagcaaggggaggtgcaagggctggtcccctcagagctggactggatgtggagacagagaagcttcacatccccagaaactgctgctggagctcaatgtataccaggtgtgtgagggtggatatgagtacacacgagatgtgcccctgctcactctctatggtgggactgccactccctgtctcctccgtgctgcttcctggggccacagggagcaaatgttactgccttggtacacgtgcatgcacaccacactcacacatacacactgcacagaaacatgccctgggccctctggaatgtgcactgactagcaactgctcctccctctcctgaggcttcttctgaggatccaagctccattttgaaaataaacccgtttgctatctcttctgcttataaaaccagtggagcatgtcatgggcaaagcctggttcaggtggccacaggctgtctaaggccccaaagcctccctgcatctgccctgatggcttggactgggtccagaagatacatgaagctctgcttaatttgggcttagggaaatgaggattttagaattcaagttgcttacctgattgtctttccagtgagctctgcaccatcttaaccccaaacaacatttcaagacattatggtcaagaataggtggccaatccatacatgtataagtaactgattttggccgggtgtggtggctcacatctgcaatcccagcactttgggaggctgaggtgggtagaaccacaagatcaggagttcaagactagcatggccaagatggtaaaaccccgtctctactaaaaatacaaaaattagccaggcttggtggcaggcgcctgtaatcccagctactcaggaggctgaggcagagaattgcttgaacccggaaggtggaggttgcagtgagccgagattgtgccactgcaatccagcctgggtgaaagagcgagactccatctcaaaaaaaaaaagagtaactgattttcaacatagacaccaacacattttaatggggagggaatagtcttttcaacaattgtgctgagataagtggataatcacatgcaaaagaaaaaagctggactgctatctcacattgtatacaaaaattaactcaaagtggattaaagacctaaaggtaagagctaaaactgtaaaactcttagaaggaaagagaggtataaacttcatgtctttggattaggcaatggtttcttagatgtgagatctacagcataagaaagcaataaaaaataaattgtaatcccagcactttggaggccaaggcgggtggatcacctgaggccaggagttcgagatcagcctggccaacatagtgaaaccctgtttctaataaaaatacaaaaattagttgggcgtggtggtgcgcacctgtaatcccagctacttggggggctaaggcaggagaatcacttgaacccgggacggggaggctgcagtgagccgagatcacaccactgcactccagcctgggcaacaaagtgaaactctgtttcaaaaaacaaaaataaaaaacgtttgtgtggttttttttttttttatttgagactgagtctcactctgtcgcccaggctggagtgcagtggcgccatctcggctcactgcaagctccgcctcccgggttcatgccattctcctgcctcagactcccgattagctaggactacagacgcccgccacaacgcccagctaattttttgtattgttttttttttagtagagatggagtttcaccgttttaaccaggatggtctcgatctcctgacctcgtgatccgcctgctttggcctcacaaagtgatgggattacaggagtgagccactgtgcctggccaaaacgtttgtgttttaaaggatactatcaagacagtaaaaagacaattcaaagaatggggggaaatatttttaaattatacagaagggcctattatccagaatatatacagaacacttacaaatcaacaataaaaagacaaataactaaatgtttaaatgggcaaacgatctgaacagacatttctccaaagaagatatccaaatgtttgataagcacatgaaaagacactcaacagcatcagtcatcagagaaatgcaaatcaaaactacaatgaaataccactttatacccactgggttgattgtaataaaaaagacagaaaataataagggtgggaaaagatgtagagaaattaaagcttgtatatattagtgggtgggggatgtaaaatgatgcaactactgcagaaaacaatttggtagttcctcaagaagttaaacatagagttacatatgacccagcaattccacccctaggtatgtaactaagagaattaaaaacatgtctacccaggctgggcatggtggctcatgcctgtaatcccagcactttgagaggctgagccaggcggatcacctgaggtcaggagttcacctggccaacatagtgaaaccctttctctacaacaagtacaaaaattagctgggtgtggtggcaggcccctataatcccagctactcgggaggctgaggcaggagaatcgcatgaacccaggaggcggaggttgcagtgagccgagatcatgccactgcactccagcctgggggacagagcgagactccgtttcaaaaaataaataaaatattgaataaaataaaatacaacaataccatcaattgagcactattgatgcctctgtgccagggaccattctaagtacttaaatctaagtacttaaaccctccagactatacctatgccactcagtgatgattataatacagatccaatctacacggaagaagctatttaggacagtcaattcactaggccaactgcaatttggtttctgccaaacagaaccgctttatattaataaatttcattttgaatgttgtgtcttttatgcttttctttatgtttgatttgtggatgttttgattttatatgtgtaatgataagcacaaggaatttatgtctaatttaaagttacaaatatttaaataatgtaacaactttgatgaactctaaatgtcggtgagaacattttacccttgaaatatacacttcaagaaatgctggtctctgtggatgctcaaggactaacttcaaggcccagctctatgaatgctggtgctggctgtgtgtttgtgcatctgtatgtcttacatttgccagttactcacaccactgtccggcatttgtctatacatcctgacccttgaccctccagtttccccataatagccgggacaacacttcctgcacagagaggatggtcactgattcagtgaccttaagctggaattttccatcacaagacacatgagataaaggcgagacatatgacaagggatggctggctggtctgcagaggaggcagacacacaggaagggctaagacaggtgagtgaacctaggtcatgccctgtgcctgggtcacactgcaggcctgtcatgccatggtcccagtggtcacaggaggcagacactgttcctccccaatgtattctatctaaattcctccatttaacatttgaaaactccacctaatatgctcagaagccatttctgggactacgagacaatctcctatattgtttgactaacaaacaatgtgcctgaccttcctgggcttgtaagtggtggaacaggactcgaaactaggtcggctccaagcccagtccgtaacaccacccaacgctggtgctctttccatggtgggtgagaaccctggagggacctgaaccaaggcgagggcacagggcgagtggaaagaaggtcccaaacacgtgggaccttcttttccgctgatgcagcatggatccagctgaaggaggcttttaataagaagttcccattttccacctatcagatgagcaaatatccaaaagttcactaataccatcagttggcaaggctaagaaacaaggacattcctggtggagtgtaaatgggcaataatctgtgaacattccatattagtctatccttttgctcggcaattttgcttctgggagtttatggaacagagatagctacgcagaactaaaagaccacatacacaaggttatttatgaaaacacaggccccagcacccattaaatactgggctgattaagtaaactaaggtacattcatacactagaacaatatgcaatagaaaaaaaaagaatgaggctgggcgcagtggctcacgcctgtaatccccagcaatttgggagcctgaggcaggaagatctcttgagcccaggagttcaagaccagcctgggcaacacagtgagacccccgtctctataaaaaataaaaataaaagaatgaagaagctctgaaatgaaaagatcttctccaaaacaagatatagaacagtgtgtatatactgcctttgtaggagagaaagtaataaataaggaagaaattttaaaaatcttttatttttttttttttgggacagagtctcactctgtcacccaggctggagtgcagtggcacgatctcggctcactgcaagctccgcctcctgggtccacaccattctcctgcctcagcctcctgagtagctgggacttcaggcgcccgccaccacgcccggctaattttttgtatttttagtagagatggggtttcaccgtgttagccagaaaggtctcgatctcttgcctttgtgatccgcccgcctcggcctcccaaagtgctgggattacaggcgtgagccactgcgcccagctgaaaatctttatactggtatttgttgtagatgcatttagaaatttggaagaatatacaggaaattattatggttttaggggtgggaggaaagaacagggtagagggagaacaggaatgggaaaggctttcactgtatatgttttagattttttttaaccataaaaagattatctatgcaaattttttattttatttatttatttattttttttttttgagacagagtcttactctgtcacccaggctggagtgcagtggtgcggtctcagctcactgcaagctccacctcccgggttcatgccattctcctgcctcagccgcccatgtagctgggactacaaggcgcccgccaccatgcccagctaattttttgtatttttagtagagacggggtttcaccatgttagtcaggatggtctcaatctcctgaccttgtgatccacctgccttggcctcccaaggtgctgggattacaggcgtgagccaccgtgcccagctgcaaaaaaatgtttaaaaggctgtgtgaagaaggctctgcccagttctctcttcagcctagttcatctgccccacatactcttccacacatctgtctgtccccacctgtccaccacctcctgcatgcagcactcaggtcctgtgtcccccaggaggtattctgtgaagtcacactcttatgcgttatgtttcatctatttgttggacgttttaaatgtactctgacctattagtttccttccttctagatgaagacaacaatattttacactgtgccttgtagagactaagtatcttgtttttttgttgttattgtttgttttcagtttttgttttatttatttatttatttttaatttagaggcaggatcttgctacattgcccaggctggcctcgaactgctgggctcaagcaatcctcctgtatcagcctcccaagtgctgggatttcaggcatgagccaccgcacccggccaagtaacttgctaaaagtcaccggggcagagctggagcccaaaccagctctaagctgttctaagtccactttctccactatgcctgtattgcctgctacagttcccagctactccagtccctggagaagtcgatgactcccttggctttctttaattactaatagagttcagtaacagacaatcacatgctatgggaagaaagggaggaggagaggaaagaaaggagggaagagagaagatgggaaggagtgggggcagcgtactcactcttgcagagaccggtctgagtcctcagcatttgctgtgcccaggtctgagtcacaggacatgggctcctcgcaatggtctggactcttggagccattctcttggagtaagcagctatcagagtttaggctgcaggacagctgggatgaactggccgtgtccaggctgagggaggaggcagtcagcttctggttcctccgtatcttatggcccgagtgatggacttcgatgtcttcagagcctgaagaatgggaaatggaatccagagattccttccgctgtagttctgcaccagaggtagagagagggtccagctcagaaagcgggcaaagcccagacagggccaatggggtgagcgtccactcatttaagatggcagacttgtaggagagttcgaaggacaaggacgtgaggccctgcaggaagctaaggaggaactcgccctcctcagcatcccggagcagggcggtgggctggtagtactcatgcaagcgggcctgctcctgcagcagcagcttcaggtagcactccatcaggccatcgttcagggccagccgcagccatgcccggcagcggcccacatccgtgttgacaaacgtcaggtgctccaactctgagatgatgtgtctgggaagggagaacagacgtgtttcaagaaactaccccaaatcacagagatgtgcttttatccactggttagcaggaaccaggaataactactgcaaatagatacaggcatgaaaaaatattgggtaatagtgttttaggccagatgtggtggctcacacctgtaatcccagcactttgggaggccaaggcaggtggatcacttgagctcaggaattcgtgaccagcctgggcaacaggacgaaactctgtctctacaacaacaacatagccagatgtggtggcttgcacgtgtagtcccagctacccagctactcgggaggttgaggtggaaggatagcttgagcctgggaagcaaaggtcacagtgagcggagattggaccactgcactccagcctaggcaatatatatatatatatttatatttatatataataaatatataaatataaattatatatatttatacattatatatatatatatattttgagattggaattgtgaaagataatttccatgttcattccaactaccacggggcccctgacacatctgctcatctaaggcatgctgtcagagctccttaagtgcaaagtccttggagcaatgaagatgcagggtaaagacatggtccctgccctcaggcacaagggactgatggaaaaaggcataaagtgtaggaaatcaacaaccctgtaagaggattggggagcgctccaattacagcatgtggcggaaaagtgggtggtttggttgcaaggccaggaaagagagggtcttaaatatcaaatcaataaggcaacacggggtaatggccccacacccagctgtgcaccagaaccccctggggaacttgagcaggatacaagttctgggaccccaacctagtgaatcagtctccaggctagcatctgggagcctgtaggctacagatttttgtttagaaaagtgacttgaccacagtcatgcagactgcagggtagatgttctgcataaggagatcagaccccaggtgtaccaaactcagtcccagaatgcctccgtctgatgtacatgcccctctgagctaccacagtccctagcgcaggtttatctcctccatgggaatgtagaccgcactctactaggctcagtgagtaagctccagggagcttcagctcagtaaatgttgaccagatgatggactcaaggaaagacagagtgagataagggggacaaatagaaagccagtgtcacccaggaaagaagaacgtgagacaaggcagtggcaatctgcatggaaaggaagattagagactgacaaggcttcttttgggctgaaggtggcatttagtagtcctcagaggcacagtgccagctacttgctcaaaagcccagacagttaggggccaaagagataagtgtctcagggtgaatattcatatgcttttcctgattccactctttatataatcccagcactttgggaggcggaggtaggcagatcacaaggtcaggagtttgagagcagcctgaccaacatagcaaaacccctctctactaaaaatacaaaaattagctgggcgtgatggtgcgcgcctgttgtcccagttactcaggaggctgaggcaggagaattgcttgaacctgggaagcagaggtgccagtgaaccgagatcgcgccattgcactccagcctgagtgacagagcgaaactccatcccaaaaaaaaaaaaaaagatttacaattcggatgtttgaataatctaaggcagggtcagcaaatccaaggcagggtcagcccttctgtaaagggccagatagtatattcttcaggctttgcaggccacacaacctctgttgtaactatgtaactctgccccagtgtggcaaaaaaggctgttcctgctaaaggtggccagtctcacctgctttttgtgaccagtctcaaagcagccacaggctcttgcctgagtgctgagggtctcaagatctgctggcacactggctgggaagcttggtctagagataagcctttctagaagacactttcaacccctacctcaccctctctctatgctagaacacagggcacctctgttggcttcctgaacagctggggaggaaaagccaagtgtcccatagtctgctgctcctccgcaaagcaaaacctctccagctaaatctcacttgtgggtgacagctttcaggaggggccagaagacaggctggggcagaggcttctggtgggcacttttcttcctttttcctccggcctcagctcggatgtgcttggcgtgcaggccatggataaatacggcctccagggcgctgcacatggtgttggcatctccgtcttcactagtgaccaccgtgtccagggacacgtactgcttctgcaaggccttcacggatcccaccagcttcttcttgatgacctaggcagcaccacacagaacacaggcctttagcggaaaatcctatggagagtccctagagtgtaatcctttagctggtgccaaatacgtgtgcaaccacatgcacacacatctatgtgtgtgtctgtagattccttctgcaaaattagcacattgttaactacagcaaagaaagataaagcatagagaagaaaaggaaaatcacacacactacccagagataattactgttattgtttgtttcatatgtcctttagtatagatactttttgttttttagaccaaacttaagtgaacttagagccatataatcttgtgtttaaatattggccccatcatagctgcagtgatgggagcttgggtaaatccatctaggacaagggtggggcttcccaccttttttacatggacaagcttctgtagagaatcaataagccaagaggcaaaaacaaacaaacaataaacacccacactgctttagaacaataaaaacatgaggagaacaggagcatggtttactttaagaaagatcctaggctgggcgtggtggctcaaacctgtaatcccagaactttgggaggtcagaggcaggaggactgcttgagtccaggagttcaaggctgcagtgagctgtgatcacaccactgtactccagcctgggcaacatagcaagaccttgtctcaaaaaaagaaagatcctaggcctggaagccagaggactaggctcagtcctagctgccagtaaccagatgggcctcctcagacattccacttaaccgctttgagcctcaatttccttatctgttaaagtggaaataatactttctgatttatagtactatgaggattctcctgaggacaggactacctttttttttctttttttttttgggaagtggtttctggtgaaaaccagaaaacctactagataaattctaaaaagaggctgggtgtggtggctcacacctgtaatcccaacactttgggaggccaaggcaggcggatcacttgaggttaggagtttgagatcagcctggcaaacatgatgaaaccctgtctctactaaaaatgcaaaaattagccaggtgtgggccgggcacggtggctcacgcctgtaaccccagcactttgggaggccgaggtgggcggatcacgaggtcagaagatcgagaccatcctggataacaggctgaaaccccatctctactaaaaatgcaaaaaaatagctgggcgtggtggcagcgcctgtagtcccagctacgcgggaggctgaggcaggagaatggcgtgaactcaggaggcggagtttccagtgagccaagatcgcaccactgcactccagcctgggcgacagagcgagactccgcctcaaaaaaaaaaaaaaaaaaaatagccaggtgtggtggtgagtgcctgtaatcccagctacttaggaggctgaggcaggagaatcacttaaacccaggaggcagaggttgtactgagccaaaatcgtgccactgcattccagcctgggtggcagagtgagactccatctcagaaaaacaaaacaaaacaaaacaaaacaaaacaaaaaacatatatataaaagagctgagtgtggcactaagactagtgttttattcatccttgtgtcaacacttggcactgtgcctggcacatagaaatactcaataaatgtttgttaaatgatacaccacaaaatgtacatagagtcttttggaaatatagagtaaaaattgagcataattataagcatgtgaaaatcacataagtgattggaaaaggactggaagggattacagaaaaactggtttgaattgttgggtgataggattatggctacatattttaatcttttattttgatttcagccaaaacactaaatgttaacattctttgaaaagttaaatttgaaaaaatataacggttttaatgagatataattcatataccataaaatacacccatttaaagtatacagttcaattgtttctagtatattcacacaattgtgcaaccatcaccactacctaattttagaagattttctggccgggcacagtggctcacgcctataatcccagcacttcgggaggccaagacgagtggatcacctgaggtcaggagttcgagaccagcctggccaacatggtgaaacccccatctctaccaaaaatacaaaaattagccgggcatggtggtgcacacccataatcccagctacttgggaggcagaggcatgagaatcacttgaacctgggaggtggagtttgtagtgagtcaagattgtgccactgcactccagcctgggcagcagagggagactccgtctcaaaaaaacaaaaaaacaaaaaaacaaaaaaacaaacaaaaaaaacgattttcatcaccccaaaaagaaatactgtatattagtgattgccaggggctgggagaaaggggaatacgaagtgaatgcagtcactaatctattttctgtttctgtggctttgcatattttgtacatctcacatgaatagatatcaatacagcatatgaccctttgaatctgacttatttcacttagcatattttccatcatgttgtagcatgtatcaggacttcatccctttttattgccagaaaatattccgctgcctagatataccacattttattcatccattcatcagttaatagacatttgggttgtttctactcttttgctattatcaataatgctgctatgaacatccatgtacaagtttttgagtggacttatatttctagttctcttgggtatatatctaggagtggaactgtacacataaccctatgtttaacttatcaaggaactgccaaactgtgtgccaaagtggctgcactattttacattcccaccagcaatatatgagttccaatctctccacatttttgccagcactagttattgccttttttattacagccatcctagggggtgtgaagtagtatctcactgtggtttcgatgtgcattttcctgatgtctaatgataatgagcatctttattggccatgtgtgtatcttctttggagaagggtctatttaaatcctttacccattttataactggattatttgtctttttattgttgagttataagtgttctttatacattctggatactagacccttatcagatatttgatttgcaaatattttctcccattctgtgggttgtcttttcattttcttggtagtatcctttgaagctcaaaagtttttaatcttgaaatagtctaattttaaatgttcttttaaaagcaagatgttatttgtatattatatttaaaaagtacatacatacttcgttcaattgagcacctactaggtgttgggttagggtatacagggagaaataaggcataccctcaagaaaggcataccctcatggagtcagtttgtgcagctgttgttagaaggctgggttggccaggcttctgccctagctctggagggtcctggggtgggattcggcaggcactgggggtgggagagtgggggtgcagaggggagggaagagcctctgcatgaaagccagctgggaaacaggtggagctggactctcctgtggccaggacggggaaaggcacgtctctgagagctacagtttctttcaagcagagttctctgagctgggaagcagcagtggggaggaaaggaaatcctggcttctccccgaaagccatctcaggatgctgctaagggaccagccccaaagctacctgacttcctgcctctccaagagaacagagagctctatctggagtacccaagatagcccaggagggtgcaaagggctgtccaagaaaaggtcctagggggctccagtgaactgctcacaaataattacatttagaatatcctagaaaatggtaagtgttcagatacatgtaagttaccaatttacccccattactgaaacaacaaaccagtgcctgggaatatctgtttcccacccattcagtgctttggccagactgtgaccaaatcatggcctaagggcagagggctgaagggctgaatggaaatccttggtcttcaggttactgatcttaaattcccactgcttttcataaatctccatcttatcaccaataaggtgatctagaaaagacagggtctcctcagagcctgcttgtgctgtaactttttctcaacctggtctctcttgcaggacagtgcccaaggaagtgagccaagccgatgatacaactgtcccctgcagcccttccccgcccttgatcctccctcacccacctaccgggatggcagcctgggggtccagtccattctccaccactgaaagcatctccactcacgcagctgctccctcagagaatcacatgacacctgaagagacagatggcagccagatgaatgggcagggaactttcccccagccagagtccattcccagcaagcagcaggaggtcagcctctcttactcaaactgcaaccaaaaaggcctttgcagaacacaaaagtaaaaactgataatagatttgaaggaaagaaacaaggaaggaaagcccagggggcttagtcgttgggaggcaaggagtcctgggtgccaggggtgggtccaccccaaggagtaggtggtaagggcgcttcacatcaaatgctgcccagaaagccaaggccctgtaggattgaaacctgtaggcagggaacgacaggctgattcagatacggagctgcaggttcgagggggaggctgcagctgaaggtggcaggaacccaatgggaccaggaagcaggggctcacaggctcacacatcacattcaggggctgggtcctgcaacaccctgcccccacccctcactcctgtcccagtccaacatctgccagctcagcagtaaaaagtaccactggaacggcttcaaaaggggagggctcccttgctacacttctgctcctcatttgggcttcgagggtctggcttgagcagcacagacagggacgtgtctaaccgggatgaccatgaggtctcatcgcagtttgccactaaccaggtaggcatgctcagacctctcagatggagaatgtgtaaaatgcctgtcacggggcctgatatgtacctgtacctgatatgttgtacctggcatctgtcatcccagtggatgtggccacctaaacctacagaccaagaatgtcatcacctaaatgagtatgcaggaagagctgaagtcagtgagtggttaaatccctcagggctgccagcttcctcctggaagtgggtggggtggggtggggtggggtggggtggggcgggtggggtggggactttagcctgagcctgagggggctgctgactggcttggccccaccacagcaacttggacagacctgggccaggcaggcacattcacacgtaaacaaatctctagccaactcctggctgagcatcaggggaaagggaaaggtgatgtctgtctcagctctcaatcaccgcacaaagaagttaacaaaaccaagaaaagttaaatgggctcagttctctttacatatattgcctaatttatgttcctcctaaggaccctaggagtgctgttttattgtctccacctgacagataaggaaatggcagctgacccaggtcaaggaagttcctgaggtcccagggctgataagcggcctgactccaccaccagcccccaggaggaagccaaccccagccctaggaaaacccgattcctgagtgagtgctgtaaaccaaaaataaaattctaagctccccaactgcctgaatgggccccccttggccaaagggatttcaaaaaaactgaaaactgagttcaggccatgacacgaagtggggcgtgggccatgcctcatcctagcctctcccttttggagcttagacacaactgaccagcattaacattaaaacagactcctaagactgacagaacagactctcagcaattaagataccaactccaacctgactggtctaacatcacatgggagataacaggccctaaggaaatcaaagtatcttacccccaagtatatttttgacatagtttggaatggccctgcaaagccatctcttgttgggaaaatttatgtcctgcagagattcccttccctttctaggccttttcctgatttagaggagatttaactaagagtctgacaccttagagacatttaccatctattctcttgaaggcttcatctacgttacatgaaccttggctttcacaacccaccttatcttaaccccaagcttttcttctgctgacttttaactctttaggcaaagtttaactttttcagccaattgccaatcaggaaaatcttttaatccaccttaccctgtccccaccaatgtataccttacatatatcaatttatgtctttgcctgtaacttctgcctgtaacttggataaaaatcaagctgtaccccaatcaccttgggcacatgttctcaggacctcccaggactatgtcacaggtcatggccctcacatttggctcagaataaacctcttcgaatatttaacagagtttggctttttcatcaacagtgccatcacctcagagctaggattccaggggtggtctgggaagaccctttcgctgggggccgggaacagggggtgcaggggaacattaaggccagtgtggcaggaaaggtttcctggacagccctggagcagcatgaggtttggaaagcagacaggcaggctggccctaaatggtggaaggtgctctgattggatctctggcttctggggatagcagagggcaaacaggacacagggagtcaggacccagagccaacctccctaagtcaggtccctcaggaggaagcaggcatgtatggaggatggttcctgcagacccagtaacaggccgggtgctgcagatggccagaagagccctcagtcctgactacagccccatctgactgcctcacccttcaccatagtctgctcccagctacccagggattctcagagccctcctctggagaccagttccacattctggccacggggtgacaggaaaagggggttgtatgctgcagtgactctgcatctagggtcacttccagaaacaggcctggtcttgaggtcaggctccatcaaggctacccttttgcagctcagcaggccacgtccagcttctctggctccgaaaccctgggctccaatcccagtccacaatttccagtggcctgaggccctcaggcccacccttctagagagagcccgaagccccaaagttgcccttcccttaaccagctacagggccgggaccctaaggacttagacccaataatttgaattatagcccaggcccattaagacctcattaactaattagctgagagtgatagagtattcacagagtattcactgggaggagcaggccattggtaagtgagtgctctggccaagtaacagtatgctaagaagacaaaataggccaggtgccgtggcccacacctgtaatcccagcactttgggaggccgaggcaggaggatcacttgaggtcaggagtttgagaccagcctggccaacatggtgaaaccctatctctaattaaaaaaaaaaacaaaaattagccaggcatggtggcccatgcctgtaataccagctactggtattaccagctaccataccggctgaggcaggagaaccacttgaacccaggaggcggaggttgcagtgagtcgagatcatgccactgcactccagccggggcagcaaagcaagaataaataaataaataaataatttatggcatggcgccgtggctcacgcctgtaatcccagcactttgggaggccgaggccggcggatcacgaggtcaggagatcgagaccatcctggctaacacggtgaaaccccgtctctactaaaaatacaaaaaaattagccgggtgcagtggtgagcgcctgtagtcccagctactcgggaggctgaggcaggagaatggcgtgaacctgggaggcggagcttgcagtgagccgagatcccgccactgcactccagcctaggcgacagagagagactccgtctcaaaaaaaaaaagataaaataaaaaaataataataataataataatttatgtctcaaataaataaataaataataaactgaagctggctgggcgcggtggctcacgcctgtaatcccagcactttgggaggccgaggcgggtggatcacgaggtcaggagatcgagaccatcctggctaacacggtgaaaccccatctctactaaaaatacaaaaaattagccgggcgggcacctgtagtcccagctacttgggaggctgaggcaggagaatggcgtggacccaggaggtggagcttgcagtgagccaagattgtgccactgcaccccagcttgggcaacagagcgagactccatctcaaaaaaaaaaattaataataataaactgaagctaagagagacagggccagacaagagaagggtcacttggcctaaaacagagtcagaaatgccacaaaatgactgacaagagctcagagaaatccagcagaagagccacttgaaaattcacaagacaggactgagcctctggggttccagccacaatgcaggacacctctgtttgtaggcagccatagcaccccacctatctgtatctgttccatcatgctcagggaggcagggctcagatggtcagtgacataagaactcacggcgggaatcagaaggaggctttgtgtctcttgactgtggggacagtactgcgtcacccaccctggtggcccagattctgaatctaccatcctatggaactggttccactttctgtcctcaaaacgctcttcattgacacaaagaaccaaagtgaagagaggtgtggcttcaaggagacctacctgaagggagtgaggcaaagctgggcaacagtaccaaagggctcttgaacatgacgggtgaaatcttagcaggggaaaggtgactggtgccatttaggaagccccaaaccacaccaagtctactgccaccctgtgtattcattcgccttcacatagctctccagagtgcagaaagcaagcttctctgatgtccctctctaacctcatttaattctcacagcaatcccgtgagagagtgattatccctgttttacagaggacaaaactgaggctcagtagcaatgggtctcgggtaagggacagaactctctggtttcttcatcccaactcctgcatctttccctggaccaaaaggcctcaggtctttggctcaaattcagacaaactattacttcttctttagaggtactcggaagctccatttcatcacagaaggtctgaaaccaacaagaaacagttctgccaatcaggtttatagccccaaccagctgagaccaggtcctaccaatgctcctaaagtctcagagctatactttcttaaatgttccaacatagttaggaaggaacagttccggttggtttcctgcattatactgcctggccttctctatatgtccaatttcacttcctccagagatcaaggaagcaaaaaaagagaatgacttggatgagacttacgttaaaagaagaaagggataacctggttccaccactctcaaaacactccaccatcagtgaacagcaacctcttctcttgagggactcctcagccactccccacggccttctctccactgcctgaattgtgtaactggctgttcagagccacagcctggctttaagccatccaactgctgtaccaattgatgagtcatgttttttcaattggaaaagaatgacaaagttatcctctgattcagaaaggcagctgatctttcaggcatgtgagtgctgactgaggaaactgcacctctgtccacctgaggaaagctggatttctgtgatgggtggagtggtgggggttggagctttgaagcaattaaataccagatgaagggtgagaaacttttagcttgtgattcccagactcagggctagtggatgagggcagaattgtggagtcagtgaacactagctatctttctttcctccctccttccttccatccagtatcacccagctttcctgtattcttgtcccatatcccagaggattctaacaaggaccaaactctgaatgaatgaaaacaggaccgttgcctgacccattcaccattgtatttctagtacctggaacagtgtttgtcacacactggtgctcaaaaaataagctgttgaatgaattgattaataaaataaaaacaaggcacggggtaagtacctccacttcacacactgtgggaagttggggtatacaactcttaagtgctggggcaactgtggagctcctgtcattaagccaagctgccaataaggctgaaaacaacttaaatatactgcatattaatgggaggacattgaaggtaaacagcattcacttttcaaaggaatacgactataagtggcaagcagagacagtgttctttggggctctttaaaactgcaatcagccaggtgcggcggctcacgcccgtaatcccagcactttgggaggccgaggtgggtggatcacctgaggtcgggagttggagaccagcctgatcaacacagagaaacccccatctctactaaaaatacaaaactagccgggcatggtggtgtatgcctgtaatcccagctactcgggaggctgaggcaggagaatcgcttgaacctgggaggcagaggttgcggtgagccgagatcatgccactgcactccaggctggggaacaagagtaaactccgtcgaaaaaaagaaagaaagaaagaaaaaagctgcaatcaaatggcccacccatctgatgccgggtcctcaggattcagagaaaatgtgtaccaaaaagcccccaggaaactataaatgctgagcatgggacttgggtgcctctggaatgtccttctgcctcagctactctgagataacatggttccctgtgttcatggaacccagatggccaaaagtcaatgatccagcacttaaaagaaaagaaagcgattcaagagcctctgtacccacctaggcctcagcctccccaggacctactcacctatactcttcacaacaggtaacgttgcctctggcacccatcatatcccctgaattcagcatcaggactgatctgccatcagctctggcagggagaggcccttacaagtgccaagaaaaggaacacgaacaatattctgtgaccacagccaacaccacacagaacttcccagaagctctccagggcgagaacaccaaccagaaggaagtgacagcttccatcattctgtgctaagtgagctgagtgagtggccgtctctcaccttccagatatttgaatgatacctaccattccagcagccagcacaagtcatttaatatgaatgccaaaaacacaatccctgaggacaggtgcaggagaccagatgccaggaaaaaccccggccccacccaagagttggggagagcccactgctcctccacccttatttaccacctgagcccctgcacccgccaatcatgctgctcagtctgtaactgcgggtctgagtgagcacctacatttggctgttgaggggcagctggtggagttggcaggcgactctgcactaagttctcaggttgaatgggagttgggtcgagggaagcaatggacgcagagttggggtgaagagttgcggtgggtcagcgggggtgaaaggacatggagatgtcatttttaacaagattgggtgagggtggtaggaaaggaggcagcaagagttcgggacagtttggcaaagacttagggatgggctgtcctcagtacggcaggagacgcaaaggaaggtatacagtggctaggagactaaggacgagaagacacagttaagacttggaataaggctgagatcggagttatccagaagaaagcggtgagctcaacagggcacctactttgggggtgggtcttagatgagagggcggaggtagaatgtttgggatgagcagatcttggggagctagacgggggatgggggtgactgggataagaaagctgagccagaaaaggggaaacctgaatggtgggtctcggggaggtaagcgcggagcatcgggattaccagaggggtggggagagaggatgaggtgtgtcagggcggggcgaagggacgtggccgagatcggtgttggaactggggtaaagtggggtcacgagtgaagctgcatttaagcaagaccgctggtgaggggatgcgggcgcgggctgggggctggacagacggaggggacggggccacagcggcggtgcagggggaaggctgggtcggagaggagcgggcgcgggctggacagggctgagggccctgaagccgggcagtctcagggtaaccaggggctgggaatcgcggagggagcgggaggcccaccgcccgttcgcgcctcggccctcccaccactccgccgccctcctcgcatcttgaccccctaactcaccaagcggagcgaggagcgaggcgaggggcgctcccggccgcggcagcccctcagcctccgagccgacgatgcggtctctcggccactgacaacaggaagcggcgccccggcccctgacgccatcacgttggctcggcgctccggccctgccccggcccgcggtgccaatcgcgcagcccgaaggagccttggggcggggccagctgctcccggaagtccctgggagctgagccccggggcagatgcgaggtctgggaggctggggaactgggggcgcctgcagggcgcagagaggcgaaggcaccggtgtcagggagaacgcatccgttaccgcccgcctcccgcaggtctgcgtcaaactagatcctggcttctgggttcctgacctcgtttggcctcagaaccatctgtgcaacattggggctgtcacttcgcctccctcagctgaagagttcccacttgtgagtgggactaataacgcctgccctatctttgcctctccgagggcagcagtgcagcccgtggggcggagcccgggcccaaattggagcctccgccttgcgctttcaggataaacatagctgttttgaccacactttatcccaagggaacgccttgaggtccccttgggcactctcccgtgtgtaactcgcccattagcaccgcctggcttgaagcttaggggtctggttattctcttctagcccgtgtagaggatttctttcttcctttctgctttttttttgagacagggtctcactctgtcgcccagactggagtgctgtggcacgatcacggctcaccacagctttgacctcacggactaagtggttctcccacctcagcctccaagcagctgggactacaggcgtgcaccaccacgcccagctaattttttcttttttctttttttttttttttttgcgacggagtctggctctgtcgcccaggctggagtgcaatggcgcgatctcggctcactgcaagctccgcctcctggattgacgccattctcctgcctcagcctcccgagtagctgggactacaggagcccgccaccacgcccggctaatttttttatgtttttagtagagatggggtttcaccgtgttagccaggatggtctcgatctcctgacctggtgatccacccgcctcggcctcccaaagtgctgggatcacaggcgtgagccaccgcgcccggccaatcttttcatttttaaaaaaatttgtttattttgtagagacaggggtctcactgtgttacctaacctggtctccaactcctggcctcaggcgatcctcctgactcggcctcccaaagtgctgggattacaggcatgaaccaccacacctggcctgtatatcttctttctaacgcaaaagtgacatttctctttcagatgaactcggaacaaaatgtcataagtggtggccacaggtagtgaagagcagggcagggagtgttggcagggacccatgctctggacactttatacttgcaggctttggtcaattgggagcctagggcctgagtgtggatgaggagaggtactgctacatgccagtcctaagtgggcacaggggttggctggggaacgggccagttcttggaagcaagcttcactgccctcggcctgggcgtcctgtgctcttttggcttctctgggtaggaaggtgtccctcttatctctgcaaagttcagagtcccactgtctgctttcaagtataaaaccagcacttgggggtatgaccctggactgtatgagggccgccctttcagtaattctctctccaggagtgagaacctccccttctcaattttagactagatgggtctgagtgtgtttactgcagttaatggttgagcaggaagattagaaataaggacatagagacaaactattctctcggtgttaaactcattttaaacaaagtggaaagtaagggatttagtagggaaatcctttcaccttggcaaaacgatagtatacaactggcacagcataatccttggtggcttggcacaagcattccctgtcccccatcaagcacataatgtccctcagtaattccactgcatttttgtgcagcggctgtgtgctggagctgtggggaacccctcggtaatctcttgtctgctttttaggagcccctatctcctggtcttctcttacttcccaagctaccctgcttctttgaaaagtcttcaggcttgcctacctcttctcagcttgctctgcatgccttggggaagctgcataaagcatggatcatgaaggagggggcgcagaggagagggaaatgcatgtttgcacaaatggaccctgagcccaccaggcaggctccagatgggggggaaaaaaaaaaaaaaaacccttacattatcacgtgacttgcgcaagaaaaaaggtacctgcaaagggccaagggaccagagaggagaacttgagaggtattctggaggaggcgacttttgatatgagctttctaggtgagtaaagggtattgcagctgaagggactggctggtaagtggccagcacataggaatacaggctgagctcagggaagggtgcacccagaggtggggaggaaggtgggaagtgaaaaaggaggctgggcacggtgggtcatgcctgtaatcccagcactttgggtggccgaagctggtggatcacttgaggtcaggagttcgagacctgcctggccaacatggtgaaagcccatctctactaaaaatacaaaaattagccaggtgtggtggtgtgtgtctgtagtcccagctactaaggaggctgaggtatgagaattgcttgaacccgggaggcggagattgcagtgagccaagataatgccactgcactacagcctgggcgacagagtgagatcctgtctcaaaaaaaattttttttaaataataataaaaataaataaaaataaaaggaagtgaaaaaggaaagggtaaggggagagggccagaatggaaggggagctgaagactgagcaaggcaaagttggaggccagtgcagaaagggctcaaaccatttgcaaggatggttcacatcccactggtctgtcagcttggatttaaagcactacccagcgttattcaaagccacacaggagaactgtaggcatcagaatgccctggggacaggtccaaaatgcagattcctaagccccacactaaccctaaagagtcactctaggatgaggtccaagaatttgggcttcaccccacctctcctgtcccctgccctcaccactgaggacctaaaggataatgaaagggggaaatctgtgccctaaataatcccttttggcagttactttctgttttcaaagttcaagtctgtcctccgggactaacctaggagatgagggataagggaattaacatttatggaaaatggaagaacatacataggcacctgtgttcacctaatattccttaccagccacctgaaaggtgggtgctgccattatctctattgtatggatgagaaaataggcttaaaagaggttaagtggccaggtgcggtggctcatgcctgtaatcccagcactttgggaggccgaggtgggtggatcatgagatcaagagatccagaccatcctggccaacatggtgaaaccctgtctctactaaaatacaaagaattagctgggcgtggtagcacgcatctgtagtcccagctacttgggaggctgaagcaggagaatcgcttgaacccaggaggcagaggttgcagtgaaccgagatcacgccactgcactccagcctggtgacagagcgagacttcatctcttaaaaaaaaaaaaaaaagaggttaagtaacttgcgggggggccacagccacagaagtagtaagtgctagaagtaggattcttacctagttctttctgattctagtttcagctttgttcagtggattttagagccagggctgtttaggtttgaatctcatctctatcccatattgtttgctgggacttccttaaaacagtgtggggcccagggcaacccaatgagtatggggctaagatagctgacagctgccaccgagtcagcatttttcacaggcccgttgagatcgcactgaagacagaaatttctaaattgaattttattgatgttcaggaaagagaagtaagtcacaacgccccttcgccctcagccccaagcagagagcccagagtgtgtgacctcaggcaagtgccaaaacctctctgagcctcagttcctcattgtaaataggggctaatgtcagttgatgtgaggagtaaatatcatgatatcctggctgggcacagtggctcacgcctgtaatcccataactttgggaggctgaggtgggtggattacttgaggccaggagttcgaaaccagcctggccaacatggtgaaaccccatctctaccaaagatacaaaaattagccaggcatggtggttcatgcctgtagtcccaggtacttgtgaggctgaggcacaagaatcgcttgaacctgggaggctgaggttgcagtgagctgagattgcgccactgcactgcagcctacatgacagagtgagactctgttccaaaacaacaacaacaaaaaaaaaaaaaaaaaaaggaaaagaaaaaaagaaaagaaaaagatgatatccttaatgcaagttctggcctgtagtaagtgctcaaagatgaacagttgttactattctagttgtggctaattttcaccctgccaattgggcaggtccttgccttccattgctcttgtaagcacttgaatgagagcctttcttgtctgaaccccagatatattcttgcttggcatctgattgaaataataaaactagtgttaatgcaccctcctctctggacactgtaatcactggtgtgctcttcagttctgttgtaggaagcggtttctttccactctctcttttttaaaaaattgattaaaaagtgttgttatacacacggtttacaattcaataaaatgaaacggaatggggatgaaacataacgaacaacagcagttcattgtccctattgttcccacccttctggggagcaggctttcagcagaatcttctggtgcttctccccacatctcctgcacgtctcattgtttgtattttattatttttttgagacacagtctcactctgtcacccaggctggagtgcagtggtgccatcttggctcactgcaacctccccctcctgggttcaagcaatgctcctgcctcagcctccctactagctgggattacaggcacctgccaccatgcccagctaatttgatatttttagtagacgcggggtttcaccatgttgtcaaggctgatctcaaactcctgacctcacgtgatccacctgccttggcctcccaaagtgctgggattacaggcgtgagccaccgcgcccagctgtctcatagttttagacactgtctgttgccttcctggtaaacctggcaaggacttagctcttttacaccccagccctgtccattcttgaggtttgggtttgccacaatttgtagaaaatgaacagtgtttacagaattgtgactatataaatattattcaccacagagcttaataatgtgctgtgaggtcaggcatggtggctcacgcctgtaatcccagcacttcgggaggccaaggtgggcggatcacctgaggtcgggagttcaagaccaacctggccaacatggagaaaccccatctctactaaaaatacaaaaattagccggtgtggtggtgccccctgtagtctcagctacttgggaggctgaggcagagaatcactggaacctgggaggtggaggttgcagtgagccgagatcatgccactgcactccagcctgggcaacagagtgagactctatctcaaaatataataaaataaaaataaaatacactctgatgatggctgcttcccccaagggtgcctcaagctctctccttttctttcagtgccatctgccattatcgtgccatcgttctcttccagtgctctggtggagcaggtggcgcccaggcccacagtgccctctccaagttctgtcctccatgtgctcaagttatcccctaaacttgtcacatgtggtcatcctggaactttgcttaactgcttcctgggttggggcctttatttcctggctcccttctcttcttgcttaatttcccctccctttgctgcagcacatactcagttaagaatccctttctaacattaaaaaaagaaaaagagaatagttcttggatctcctcatgatagaaattatatctttaggccgggtgtggtggctcacgtgtgtaatcccagcagtttgggaggccgaggcaggtggatcacttgagctcaggagttcaaaaccagcgtgagcaacatggtaaaaccctatctctacaaaaagtacaaaaattagccaggtgtggttgcatgtacctgcaatcccagctactcaggaagctgagggaggagaatctcttgaacccaggaggtggaggttgcaatgagctctgatcatgccactgcactccagcctgggcgacagagtgagaccctgtctcaaaaaaaacaaaataaagttgtatctttaatatccattaactgaaaaataaaaataaaaataaggaccaaaaattactatgaggacacacatgcttttaaatgaatttgtgtgttattaaccacagtaacatctatgaacttgtgaaaaactgttactggtttaggcttaagggtttgcccagtctagcttcaatgttcaatgggtgggcacggtggctcacactttgggaggtggccaaggcaggcagatcgcttagtccaggagttggagaccagcctgagccacatagtgaaaccctatctctacaaaaaatttaaaaattagctgtgcgcggtcacgcgcacctgtagtcccagatattggagggcagtgggggttggcgctgaggtgggaggatcacttgaggccagaaggtcaaggctgcagtgagccgaggctgagtcactgcactccagcctgggtggcacagcaaaactctgtcaaaaaaacaaaacaaaacaaaacagacaaacaagaaccaaagttggatgcagtggctcatatctgtaatcccaacaactcggaaggctcaggcaggaggattgcttgaggccaggagttcaaggccagcctgggcaacatgctgagacccttgcctctgaaaaaattaaatattaataaaaacaaaccctagtagcttcagtctttgattctccatccctcatttcatccctttgtcttctggtaatagaatttccttcttgtttttcttttgggatgagccaccttcgctccctgggattctgctgggattgagttaccgccttccgggctcaagcgatcctcccacctcagcctcccaagtcgctaagaccataggtgcatgccaccatgcctggctaatgttttgtattttctgtagagccggcgttttgccctgttgcccaggagtttttcctttaatgttctcctgctacttactaattcactttgtcaccctgtgagctcataagagcagagagatagcaacaggagctaaaaaaactctaagctgtgaaaaaatattaaatatgaaatcatgatagctattagcttaatttgttttaggcaaattgcaaagtaattttttgggaatcagtgtcccactgcagtgattccatatggggattcctaattcccagtatgtttttaaaataatttgtaaacacctagtacaaacgcatgatatgaaattcaagaggtacaaaagggcatacagccctgcactctcccagtttccctccccgaaggcaaccgccattaccagtttctcgtgtgtgcttccagaggtattcttgtccaacagaacttcagtgatgaaaacagttgcctgtgctgccagtttggaagccattagccacacggggcagttgagcacttgatatgtggctagtgtgtcttagcagctgactttaaaaaaaatttttttttttttaaagactcagcgtcttgctctgtttaccagactggactgcagtgagtgtgaacatggcctcaaactcctatttatttattttttgagacagggcctcactctgttgtccaggctggagtgcagtggtgcagtcataggtcactgcaaccttgacctcctgggctcaagaaatcctcccacctcagcctcctaagttgctgggactacagatgaatgccaccatgtttggctgatttttactattttaaattttttgcctgggcgcagtggctcatgcctgtaatctcagcactttgggaggctgaggcgggcagatcacctgaggtcaggagttcgagaccagcctggccaacatggcgaaaccttgtctctaccaaaaatacaaaaatttgctgggtatggtggtgcgtgcctgtagtcccagctacttggaggctgaggcacgataatcgcttgaacccaggagacagatgttgtaataagctgagactgcgccactgcactgcagcctgggtgacagagtgagacccgtctcaaaaaaaataaaaataaataaattttttgtagaaaaggggcttcactatgttgcccagggtgttcttgaactattggcctcaagctatcctcccacttggcctcccaaagtgctaggattacaggcatgagccactgtggccaacctaagtttatatgtaaatagccatatgtggctagtggctactgtatcagacctcacagttctgtacagataacgcacagtgcacagtagcatactatacacgccctactaaatcttgctttgttcccttaacagcacctatgcatcttggagatagattgtcccagtctgcctcatttttaaaaactgctgcataatatcctcttgtaatccacaaaggcaatcccagacccagcctggggggccatgggtcatcactttttacaacaagctctaaaatcttccacatataccataatcaaggcacttcagaacaaccctaggttcctcatgcctctacttttattagcctgggcctgacatagttggacattgaatagtcacttctgggggctggtggaaataatttaccatgagtgactgccctaaaatatactctccacccacgtggcccgtgcctggcattcactagtgctggtggcattctttaaggttgctcatatctctaagtggttctcctttaaagagcaaagtctcctgggaaaggtggtcattaagcagaacatctggggctcatcttgcttttgccctgttgagaggggccaagggacttggtagagcagcaggggctctgacggtgaacctcattgtttttaaaattattcttaagaggccaggtgcgttggctcacacctgtagtcccaggactttgagaagcagaggcaggaggatcgtttgagtccaggagttcaagattagactgagcaacacggggagacctcatctctacaaaaaatttaaaagaaaattaattgggcatcatggcacgagcctgtggttcccgctacttgggaggctgaggtgggaggatcacctgagcccaggaggttgagtcttgcagtgagctgagttcacaccactgtactcgagccttgatgacagaatgagactgtctcaaaaaaaaaaaaatgtccttaagtccatgtggacccctgactaggtttgtgccctagacagccgtcctctgagggcaattcaggtggtgagactccaggtttaaatggcctccacagaaatttcactaacctgccttggtgtttgaccctgtataacccctttcttctggaggtccctttgggtggcagtagatacaggatttggtgtctgacagctctggggacagatcccagctccaaatggcagagtctctacagattacaagccaaatacttagcactatgtgctgatcttcaggaagtcagtctatatttcataacaagtcacatggggataatgaaggaatggcctaaaatgctctcagtaatattcctgagtcatccctcagggctgggcttggtgttatgcatggcggggaagggagcagagctgtgtgcagaggaagatgcagttcttgccttgtcaggatccctgacctgatggcgacccatggtggagtcttcatagtgacagacaccactgtaaaagcagatccaggttgtgcaaccctcaaagcaggtctcctcactcaccgggatagatagactattggccgtacctgcatccaccgcttgccatggtttcgttgtgggtggaggatactttcctgtcccctggctttgggtttgcccacgtggcttgctctggccttggaatgaagcagaaacgaaaggctgccagttccgagcccacgtctgaagtcgccttaggtggttccgcgggccccgtgcgctcccaccttcacccagagggccttctctggtgcagccgctgcttcttcagcctccgcccaaaaggaacggagccccctggccgatccgcaggcctacagggagccacagagcgcagcggctggaccagcattcaagcccaagcacaggcctgcgagaaccttgttcgagccgccgtttaggatggttgattaggacgcgttgcagtggcggtagctcaccaatccagtgcgtgcacccgctcctttattaggctaaagaaccagtggctcccacagggacctgatacaacagtgcgttaaataaggagcttattgagctctcatgtcctaagtcagtggagaagtccagggctagtgtgggggctccggcgggggctgtggcccccatccgcatggagcctccccatggttcacaggtctcagtcttcggagccttcggccctgcgagcccgaacggtccacagggcggcgccagaccctctttcgaacgccatcctcttaaagcctcggctccaaccggttccacttcttcaggctcaggattttcactcttctcgaatgggggtggccctcccccaatcttctgagtcgcaacagcatctccctccctccaggacctcagagccagagctgggcgagaggccctaacctccggggtagggtggaagcgtccctgtgaaggtgcagtcctgcctcccatccccaggcgccgggcctctcccaccctcagcgccctgctcacctccagctgaagatgccagggcacctctgcttcctccctgccctctctgcagtaccgccgagtgtgcataaaagggtttaatataggctttgccgggcgcggggactcccacctgtaatcccagtacgttgagagaccaaggcgggaggatcacttgaggccaggagttcaaaagcagcctgggcaacaaagtgaggcctgtggaaaaaaaaaaaaaaaaaaaaaaaaaagaataaaagaggtccctttttctgggagattgatataggggagtgtgagttagaagggaggcattgaggatcagtcatttaaagcagcatccaaggatgttcaaggctagagatccacaggtgtattttcagaaactgaatttcctggcggggcacagtgactcatgcctgtaatcctagcactttgggaggccaaggtgagcagatcacttgaggtcaggagttcaagactagcctggccaacatggtgaaactgtttttagagaaaaaaaaaattggccaggcatggtggtgggtgcctgtaatcccagctattcgggaggctgaggcaggagaatcactggaacccggaaggcagaggttgcagtcaaccgagatcacgctactgcactccagcctgggtgacagagactgtctccaaaaacaaacaaacaaacacaaaaaaaccccaaaacccaaaacaagccaggcgtggtagctcgcacctgtaatctcagccctttgggaggccagggcgggtggattacctgaggtcaggagttcgagaccagcctgaccaacatggtgaaaccccgtctctactaaaaatacaaaaattagccgggcatggtggcgcatgcctgtaaccccagctactagggaggctgaggcaggagacttgcttgaacccaggaggcagaggatgcagtgagctgagatcgtgccattgcattccagactgagcaacaagagcaaaactccaccttaaaagaaaaaaaaaagaaaaaacaaacaaaactcctgaatttccctgtggatatcttttctctggtagcctttttcaatgagggctaagttttctccaatactatatggcctgcagaccgctcagctttcattccagtgaaaacattccagaaaaaactctgaatcaatcccaggtgtttctccaatcagctcaggatgattgtgtgttacctgctgcccagctagtgacacctctccaggcctctgacttagctaggtctccatgtcactccaccgtagactccccgccttcttcttttgcaaagcctcggacacccaaacacctaccaaaagtgggtagggtgccaggacacctccaagtgtaagtggggctctccagcacacctggatgtggaggtgtgatgcagagtggtggctgctcgtgacactcatttcacccctttctgtgcaggtgccagaagcccaggaagcacacatcaaggctcgcttgccagcggggtgctgccaataaaatgtagtcacgtggaatttggaatgtggaaaggaggtagaagtcatcctttcctcccccatagcagcaggtgtgcaggctctggtggtcagctggactccatactcccccaccagtcaccagcctggggaccgtggggctgcaaggacctcagcagcggtttcccaagtttcctgacttcttccatcctctggaaatcagctgtggtaaagtagcctgaaagccagtggtgcaaccccttccccacaaccttcaccacctctagcccctccagtgataagcactaattgcctatatacaacccttttttgtttgaaatatctaatttctgttttcctatctggggtagtgtaacataagaagaaatatatatttggtctctgcccccagttcctaccacaaagctcctaaaacccttggaaattcctgaatgatggcggtgctaagagcattgtcctttgttagtttatcatttttcttttctcctaggtgttttttcctttttaaacttttcttttaggttagggggtacatatgcacgttcgttatatagctaaacttgtgtcatgggggtttgttgtacagattatttcatcacccaggtaccaagcctagtacccaatagttttttctgctcctctccctcctcccaccctacaccctcaggtagggcccagtgtctgttgtttatgagttctcatcattttgctcccacttacaagaacatgcagtatttggttttctgttcctgtcttagtttgctgaggataatggcctctagctccatctgtgttcctgcaaaagacatgatctcgctgttttttatggttgcacatcttttgttctaacatttggtccttaaacctggttcctgatacagagctcctaaatcccttggaattttctgggtgatagaagcgtcctttgttctcatgaggtgactcttggtgggctccttatttggggactggtcaccaaaaagacctatggttggaagcgttgtgctgtcagccccattccccatcctctggcgtggggaatggagctggagctcaatcatgcctatgtgataaagcctccagaaaactccttaaaagacaggacttggagagcttccgggttggcgaacacatccatgttccaggagagtggtgcaccccaactccacaaggacccttccagacctcaccctgtgtatctcttcatctggcttcatcatttgtgtcctttaaaatatcctttgtaataaatcagcactagtaagaaaactgttttcctgggttccatgagctgttctagcaaatgttcaaacctgaggagggagttgtggggacctccaatttacagccagttggtcagatgcataggagatgcttggccttgcacctggggtctgacatggggatggtcctgtgtgactgagcccttaacctgtggagtctggtgctcactctgcttagggcttctctgcctttttagtgtccttctagaaggcctttccttcctcttgtcagctcagaaaacttttcttccacttcccttcttctaaaccatcccttacatctactcctttccagtcgaccaagagcagaaccacggctggctccactgccaccatgctgtcccacactgtctcctcaggatgtattcagatgtccagccctccccccagtctaggagccccccctttgaggaaagggatgctggcctagtcaactctttcccagcaccaggcacagcatctggcacgttccatctttttcgtggactccccccaggcggcctgaccttccctcctctgaaccggtgcatttcttgtctgcatcatgtttgccctaatcagatatcgccttatttccatcttttaaaaaatgctttatttctctggcaggcttcatcggaatcacaattttcattcatttagtaactgttggccttgtatccacccctctctggcactcaggtctcacttaagagctggctgtctgagctgtgatttgcgatcagtgagatggagacagaggcagccctaggcagtcatgttttgttccacctgaccctgggcgccactccccctcccaggctacaggcaggcatgggcaccagccagggagagacagctcatccatactctggcccagcagaaactctgggcttagacaaaactgctcaattgaggacaaactgggcaaagtagaatctttctttgggagtttttagaaatatggtggggtggcatttgggaataataagaatagtagctgggcatggtggtacgcgcctgtagacccccagctctggaggctgaggtaggaggatctttggagcccaagagcttgaggcagcagtgagctatgaaggcaccactgcactccagcctgggtgacagatcaagaccctgtctgaaaaaaaaaatgtacacatttgagatgcataaaattttcttgttatataaaaaaattataagcatcgaaatgcgaaattatgtaaatatgccaaaatagaaacctggaggtgcttggaatccagactttgagagcccagcagtggaaggatctctagtgttggcttttttttttttttgagatggaatctcgctctgttgcccaggctagtgtgcagtggcccattataagctcactgcaagctccgcctcccaggttcaagcaattctccctccctcagcttcctgagtaactgggattacaggcgtgcatcaccacccccagctaatttttgtaatttttagtagagacagggttttgccatattggccggggtggtcttgaactcctgcctcaggtggtccacctacctcagcctcccaaagtgctgggattacaagcatgagtcactgcaaccggccttgtcttggcttcttctcagctccctgcttatgtccaacactcacccctattagagctggtgtggggagcttctgttctgatgacttaacagtgtaattatagtgcttagcgctgtacctggaccacagctggtgccaataaacaggagctgccatccatctgcatgttattgttatattaactctttgatggcaaccatggcttatccccccatctccccatgccctacagcagggcagtagaatggttaagaggctttgaagtctaacagtgctagcttaaaaccctaatttgttgctttgtatgtgtggctttggacactttgggcaggtcaccttcgttcttcgagccctgtatccttatctgtcagatgatgatttttttttttttttttttttgagatggagtctcacttgcccaggctggagtgcagtggcgtgatctcagctcactgtaagctccaccttccaggttcacaccattctcctgcctcagcttcctgagtagctgggactacaggctcctgccaccacgcccggctaatttttttgtatttttagtggagacagggtttcaccatgttagccaggatggtctcaatctcctgacctcgtgatccgcccgcctcagcctcccaaagtgtcagatgattttaacaactatgcttccatgacttgctgggctagatgatatgactgtaaaatgccaaacccacggtttagcatcaagtaagcaaattgtaaatggtagcgctgctctgcctatgactagtcttgtgctttaaactcaaatatttgttggcctactgaagtcaccacacagagaaagatgcttttcattctcagtaaagaactttgggagataactggggcaggcagcaagagaacagatgtcatatgtctagcatcagcaaactcatcggaactgatgggcagctcactttgcttagaacctgcaccagcatacacacggggctgcttcccagtcacactgctcctgggaaggtaggggggctgctgttctgcaattagcgtggttctttacctcctattactgaactgccagagttcatttgtgttcagttaggtagatgaccaattcttgttcattcctattttcttttgctcactaatgtgtttaacattcactaacctaccaaatgtgatttattagcgactttttctttgaagatggagtggaggaatcctagcactttctgcaacattctactgctgttatggaacagtgcagttatggatgagcgtcagccggggatggggagaggctagggcagtacatgtgaattgagaggtagccccaccagtgtgttttctgaaatacagtcccacagagggcagtcttgggaaattactgttctcacactcttcttgactctacccctccagcacctccctgctatccaagggttgggatttttaaaaagaaaaacaaatttttaaaaaagcaatgtgaatcttttgccatcttgtaagggtgaaaagccccctaccaagtcgggatgaacactcatgcgtgtgcttgagggcttgggaaaaagacagggcttggccccacagtgcaggtaggcccagtgatcctatgataggggccaggagatgggaggtcccctgtgggcaggagttcaaatctgtggtattatatgactgatgcttgatgaagcaagggagagggcaccaaaaacaatggtaattgtaaaatctccaccccctgaggatatgttttcaggtctgggtgactaattagactgggaaacaagggcaggaacgatggccctgtgcttgctctgcccgctgcctctgtggatgtgtgggccgctggcttcagtcctgcttttctttctgatggtattgtttatgctatgtgtttttgcaggaggcctgaggtgggctgggttctcctcctatggcagggcttcactctcctcccccttctctgttggggcttcgctgtccctgggataagaataacaatgccaaggttttgattcttgaaaggagcaattaagcttctcaccccctcctcattttagatgggacctgtgagggctccgtcatttacccagggtccctgttgaggatctcgtcctcattagatgacttcttgtgcagcttccatgcgtgattatttactcttgtggcactgagaggtttgtacatatctttaagccagagcggccgtctgaatgaaaaaagtccatcctagaagatagaaagggaaatactaattttgcatgtcctctgccttccctggccacagcaatgaatcctccaatgtacctgactctcccttcgtgaagagcatctcctccgtggcagaaacctgaaaatgcccctggggagacacatgcacaagacagtgagtgatgcagccatttcccacgtatctcacaatgtacttctctggtcttactaggactaaatgagtatctcagtccataatcacagggagaagaaccaccacagaccacatacctggggtcttgaaaataattccatgcatgtgggactttcagaagctctcccatgtctgtccagaagggccccacaatataatggggggactttgtatgtggctcagcatggagcaggggcaggatgttcagtcccactcactcccttggccaagtgcccttgtgcagtgaacaaactgcacaaccatgctgggcggaagcattttatatcagtcccctttggacttagtctcacaggcatcatttgatgggggggtgggagatgaagtggttcttccttttctagatactttattctataagttggatcacctcaagcaaatgtctgagtgcagctagccaagttctctatctcagtcttcatacggctggctgtcgctgatgagtgagtgagctacgaaatcagcttaaagcacaacatgttatttttgaatttgaataaaataggaaaaggcagagtgcattgtgtgaccatggggtaagacactctccctttctccttctcagttttcctgtcataaaaggacaaactactatctaaggtctccgtagttaaaattcttttttgttgttttttttatttgagacagtttggctcattccccaggctggagtgcaatggtgctatcttggctccctgcaacctgtgcctcctgggttcaagcagttctcctgcctcagcctcccaagtagctgggattacaggcctgcgccaccacacccagctaatttagtatttttagtagagatggggtttcaccatgttggtcaggctggtcacgagctcctaacctcaagtgatcccaaagtgctgtgattacaggcgtgagccatcctgcctggcctttctggttaaaattctgtgaggtttgcctaaaaggaatagagtagggacacaaaaaccagtaagatgagaaaatagtgtttcctcagttctaggatccaggggaaaaaataaataaataaaagagaaaatactgtttcctgccacttaagaggaaggactcacatatcctaccttccatcagccttgaaggagacaagtgccctctctctcacacccggtggccttcccttcccctttcccagagcctccaagaaggcccctggcctggcctgatgcccaccatcagcagcaataggcaccaaaacctttctccttcctatccctccccacctcccgaaagggctggggacagcaggtgtgtccttgttagttccatccagctcagctttggctggggagctaatttcactggagccaggctaagcattagggtaagtaagtatttgtcctgtcttgggcagtttcctcactgaaaaatgagggcagagttctaagccctcctctaattctaaaattctaattaaaacgtcgcgagactagtggtggtgcatgcctgtaatcccagctactcgggaggctgaggcaggagaatcgcttgaacctggtaagtggaggttgccgtgagccgagatcgcgtcattgcactccagcctggcaacaagagggaaactccgtctgaaaagaaaagaaaaaaaaaaatcaccagactaatatttaccttgagaatccttcttcatcttcttgtaatgaccttcggtgacaacacatctgttttagaagaaaacgcaattaagattatctatgacaacaaccaccatctccaaatctgtattgattcattttattcattataagtctcatctacctgatgaggtaacttttttgaagacaggaattgcatactgtgtaacactgctttgattcttccatagttcagtcatccttgctatcttgcgggggattggttctaggataccgcccccacaccataccagaatctgtggatgctcaatcccttacacataatggtgtagtatttgcttataaccaacacgcatcccccctatactttatttacttagcgacaggattgccctctgttgcttacgctggagtgcagtgtcatcctctgttactcaggatggagtgcggtgtcatgatcacagctcactgtagcctcaacctcctgggctccagtgatccgcccacctcagcctcttgagtagctgagactacaggtgcatactaccacacctggctatttttttttttaatttttaataaagacaaggtctcactatgctgcccaggttggcctcccaatgtgttgggattacaagtgtgagccaccatgcctggccccatgtaatttaagtcatcactaataaaatgtatacatattgtacagtggtgacagttgttatattgtactttctgtttgtatttttattgtttttttttcttcaaatattcagcctgatctagttgaatctgaagatgtggacctgctgatgaagagggctgactgtatctaacttagggtcttgcatgcagctggcacttaatacattttattgactgttttagataacattcaacagataattcctaataaaaactcttaaaagtaggagaaaaaggaaacctgagtccttcctctgaagtggcaggaaaactagcctgggcaacatagcaagaccttgtctctacaaacacattttttaaattagctgcctgcctgtagtcccagccactcaggaagctgaggcaggaggatcccttaagcccaggagtttgatgttacagtgagctaggtcacaccattgctctccagcctgggtgacaacaaggccctgagaagggaaaaaaaaggaaaggaaaggaaaggaaaaaggaaaagggaaaggaaggaaagagtagaagtattggaaaggaagagacaaaactatcattatttgcatattaaatgaaaaatgttagccaaagaagcctaagagaatcaactaagattttactggaagtaatgagaattcaatacagtggctatctacaaaatcaagaaatcagcacacaaacctcaaatacttttcccatgtaccaccaataactaattagaaaatggaagaaagatcccatttacaatggcaatacaaatgtatgaagaatttaggaacaaaaatacaaagatcttttatctaataaaagatgtgtaagatctatatatggaaacactaaagctcttctgaaagacattaacaagaaatgaatacatgacatgagatagcacgttcctagaatgttctacagatgtaaattctcaaattaatctacaaatttaacataatcctattcaaatcccaagatagtttttggtggtggttgtttttaagacagggcctcgctgtgttgcccaggctagagtgcagtggtacgaccacagcttactgcattctcgacctcccaggctcaagcgatcctcccacttcagcctctgaagtctctcatatggtgtccaagaaatggtgacaaatctcacaaagggactaggctcagcagggctggaatattcagggaaggtgtcaagaagaaagatgaacttgagttggcttttgagagatgcataggactcccacaggcagagtgaaataagggcattttagatggacaaacacacagacaaaagcagaaatgtgggtggtgtgactggggtatggtgaggggctgctgtggctggaatggagggctgccacaataatggaaatggtaaatgaggcaaataaggttggactggtggcatagcgtcaaggttgccagctttattaaatcactcttccaatatgctagcactggcctgttgggaaaagtaatatatcatgtaatcgaacaaaagacaaacagaggcaagctccaggaatgggcactgtaaacaggacttgccccagagtagccagatgtaggctttagataagttgatgcaggctgagcatctctaatctgagggggaatgtctcacgtggtgtccaagaaatggtgacacatctcacagagggtctaggctcaagagggctagagtatgagacgttccccctcgcctgcgaacttaaaaatgtggccaacaatttttgtaaaagatggctactctgtagtgctttaactggacctatttagacaatgccttacacactggaggacgatactgtgtaaatctaataagtctacaagacaatacttctgtcttttggctctctccttcctctccagggtgatgacaaatccgtgagggtggagattatacctctctcatcatttcagcaccaaggaaataaattagtggcagagtaagggtgacttgatgagtacatccaattgttgacatagttttgggtggagaaattttgctattatatcgacttcttaaaatagtctagtgggattaacttggtttcaattcacagagatctggaagcgaggatcttttaaaaatcctgaaatatacactgcaataaaagaacaaagcatacacctcagccttaaatgactgaagaagtatgtcaagtagcagcaggtgggaaagtggctttggttttcagtttgtgagctctgaatccacacaaaaacaggactgcattctgaaaacctgaattaattattgtccttaccacaatgaggcagaaaagtataatcaaaatcattagtatttcagtcacaattaatgccaagatgagtttgtcagtatagccgtatcctggaacttcttttgtgagctaaaaaaaacaaaaaaacaaaaaaaaaacacaccagaatgagagctaactattcaaaaccccagtattccaggtgagtagcttacaggttctattttatttttttgaaagagggtctcactctgttacccaggctggggtacagtggtgcaatcaccgttcactagactcgacctccctgggctcaggtgatcctcccacctcagcctcccaagtagctgggactacaggcacgtgtcatcaacccagctaatttttttattttttgtggagacaggctttcactatgttggccaagctggtctcaaactcctgacttcaagtaatccacccaccttggcctcccaaagtgctgagattacaggcatgagctaccacccccggcctacagttcatcttgtgccctaatctatatttcactctctacatgagcaaagtgggagatcactgtcatgaccaaagttacatggccaagataagctatggcctgggagtcccagattcttctgtgtgggcactttcctgggatatgctaaatgatgggaaatctgggtctcatgtttctgtgtggtcctcacctcaagcgacttctctttctgttcactctgggcttccgtgctctcattaatgtagttctcagtcttccattggtccgtatcccattctatctcagatgcctttacttcctgctgcccactgagaagcttcatcaggtggcctgtcctggagatgagcttggcacaggtcacttgcacatgggccccagagcagtccatcttcaaggtccggataacatgagaaatgagccttctcacattgttgttggggataagggactgtagctgctgggttagctgaatttcaaactgagcaatgggtaattgaagcttttgggctcgggggacaggtcagtgcccacgttgttgtattcccattttgtctcagtttgtttaacagttggccctaagttgaatgcagtcccagcggaatctgcctcaggaggatgattgtagtttgtgttttcagagatggtgacttctggcatgttagtgttttccataaaaacattttcttccaaggcatttcttgcagttgtgtcttttatattagtggtttctataaaatgttctgaaggagcagatacttccagaaaagggttttcttgaggactcaggtctcctaaggatgaaaaagccccttgtgaaggggaatttatgaggctcttcgctgcagagaacggaggcctgtttgcgagcatcagtctactcagataacttttctttctgaactttggactctttttgaccttgggtgttctgtgggtcatgcggagcgagttttgtgaaagcggtatttttttctggaatgtgaaattggtttagaagccttcatatttgtaactctagcctttgcactttctaaaatggaaatagtgtgtgttgtctttcaatctgtctctcacctgtggtagggcttttgcagggctggaggtagaaggcgcgcccttggagaagggtgtcagcacagagactgctgccttatgctcttggctgaacgaaggcttggtgtagatggcgtttcccgctaacttctcaggcccctgctgtgtgtgaggctgttccagctcccttggggctggactcccgagccttttttcttcggcagcgttctccacagatgcctgggcaccctgttccctcctgatgctctgccttcccacctctttgaagtgccttttctggatgctcattgggcccatgaggactctattcactttttgccagttttggcctacagtttgaatctttgccaggctgtttcctgtggttggcagtttaatgaacggtagtaacattgattccacatctaggtttactgctgagaaatatggcaaatgtaacttagtgcactgataacatcactctcgtcattggtgtctagctgctcactcccaaagcctgacaagttgatgccactgctgtctgagggctcctccggctcaacagtcagctcagtgcttgtgtaattcttccgggcttgtaacatcttcatgaatgctccttctggattccctacagattcttcttcagctgtcaaaaaagagactgctttgctcgtgaaagatgatgggatgggatgcatcagtccatagctgtacaccccagtcacgcagagtaggagtcagcaaacatttgagtgccattcagagaggagacacacacacccaatcctaaacctatgaaatggcaacaacaaaaggagaaaatatatcttttgaaaacacggccatctacttggaacattccatagtgtgacatagagtaactctgcttaggattatttcattgatccccagggtccaattgcccagtgctcagtcaaagcccaaggtggaagacaagtgcttccctgatgagctgatgagctggcctctctgcagactgctccataccctgtgctgtcctgcctcagatgcagagagagcacaaggctcccgctctcctcgtcctcggtgcgcctgtgttcttgctaccatcacagctgaatgcaatgaaaggcggtcctctgagaggagcagggtggagatgctaaagtggaggccccctcccattgctgatagatcctcatctggcatgcgctccaccctccccattctctgctcccacatatcgtagccccatcacagaagatgcgacatggaaaaaagcactgtgtccaccctagttcttaaatttgggcagggatttggggtgtatgttaagagtttttcaaatttgccagattgtatgcctatgttgttaaatacacagtgaatctctggtatgatagcagtttctggtgggagatgcataggactcccacaggcagagtgaaataagggcattttagatggacaaacacacagacaaaagcagaaatgtgggtggtgtgactggggtatggtgaggggctgctgtggctggaatggagggctgccacaataatggaaatggtaaatgaggcaaataaggttggactggtggcatagcgtcaaggttgccagctttattaaatcactcttccaatatgctagcactggcctgttgggaaaagtaatatatcatgtaatcgaacaaaagacaaacagaggcaagctccaggaatgggcactgtaaacaggacttgccccagagtagccagatgtaggctttagataagttgatgcaggctgagcatctctaatctgagggggaatgtctcacgtggtgtccaagaaatggtgacacatctcacagagggtctaggctcaggagggctagagtatgagacgttccccctcgcctgcgaacttaaaaatgtggccaacaatttttgtaaaagatggctactctgtagtgctttaactggacctatttagacaatgccttacacactggaggacgatactgtgtaaatctaataagtctacaagacaatacttctgtcttttggctctctccttcctctccagggtgatgacaaatccgtgagggtggagattatacctctctcatcatttcagcaccaaggaaataaattagtggcagagtaagggtgacttgatgagtacatccaattgttgacatagttttgggtggagaaattttgctattatatcgacttcttaaaatagtctagtgggattaacttggtttcaattcacagagatctggaagcgaggatcttttaaaaatcctgaaatatacactgcaataaaagaacaaagcatacacctcagccttaaatgactgaagaagtatgtcaagtagcagcaggtgggaaagtggctttggttttcagtttgtgagctctgaatccacacaaaaacaggactgcattctgaaaacctgaattaattattgtccttaccacaatgaggcagaaaagtataatcaaaatcattagtatttcagtcacaattaatgccaagatgagtttgtcagtatagccgtatcctggaacttcttttgtgagctaaaaaaaacaaaaaaacaaaaaaaaaacacaccagaatgagagctaactattcaaaaccccagtattccaggtgagtagcttacaggttcttttttatttttttgaaagagggtctcactctgttacccaggctggggtacagtggtgcaatcaccgttcactagactcgacctccctgggctcaggtgatcctcccacctcagcctcccaagtagctgggactacaggcacgtgtcatcaacccagctaatttttttattttttgtggagacaggctttcactatgttggccaagctggtctcaaactcctgacttcaagtaatccacccaccttggcctcccaaagtgctgagattacaggcatgagctaccacccccggcctacagttcatcttgtgccctaatctatatttcactctctacatgagcaaagtgggagatcactgtcatgaccaaagttacatggccaagataagctatggcctgggagtcccagattcttctgtgtgggcactttcctgggatatgctaaatgatgggaaatctgggtctcatgtttctgtgtggtcctcacctcaagcgacttctctttctgttcactctgggcttccgtgctctcattaatgtagttctcagtcttccattggtccgtatcccattctatctcagatgcctttacttcctgctgcccactgagaagcttcatcaggtggcctgtcctggagatgagcttggcacaggtcacttgcacatgggccccagagcagtccatcttcaaggtccggataacatgagaaatgagccttctcacattgttgttggggataagggactgtagctgctgggttagctgaatttcaaactgagcaatgggtaattgaagcttttgggctcgggggacaggtcagtgcccacgttgttgtattcccattttgtctcagtttgtttaacagttggccctaagttgaatgcagtcccagcggaatctgcctcaggaggatgattgtagtttgtgttttcagagatggtgacttctggcatgttagtgttttccataaaaacattttcttccaaggcatttcttgcagttgtgtcttttatattagtggtttctataaaatgttctgaaggagcagatacttccagaaaagggttttcttgaggactcaggtctcctaaggatgaaaaagccccttgtgaaggggaatttatgaggctcttcgctgcagagaacggaggcctgtttgcgagcatcagtctactcagataacttttctttctgaactttggactctttttgaccttgggtgttctgtgggtcatgcggagcgagttttgtgaaagcggtatttttttctggaatgtgaaattggtttagaagccttcatatttgtaactctagcctttgcactttctaaaatggaaatagtgtgtgttgtctttcaatctgtctctcatctgtggtagggcttttgcagggctggaggtagaaggcgcgcccttggagaagggtgtcagcacagagactgctgccttatgctcttggctgaacgaaggcttggtgtagatggcgtttcccgctaacttctcaggcccctgctgtgtgtgaggctgttccagctcccttggggctggactcccgagccttttttcttcggcagcgttctccacagatgcctgggcaccctgttccctcctgatgctctgccttcccacctctttgaagtgccttttctggatgctcattgggcccatgaggactctattcactttttgccggttttggcctacagtttgaatctttgccaggctgtttcctgtggttggcagtttaatgaacggtagtaacattgattccacatctaggtttactgctgagaaatatggcaaatgtaacttagtgcactgataacatcactctcgtcattggtgtctagctgctcactcccaaagcctgacaagttgatgccactgctgtctgagggctcctccggctcaacagtcagctcagtgcttgtgtaattcttccgggcttgtaacatcttcatgaatgctccttctggattccctacagattcttcttcagctgtcaaaaaagagactgctttgctcgtgaaagatgatgggatgggatgcatcagtccatagctgtacaccccagtcacgcagagtaggagtcagcaaacatttgagtgccattcagagaggagacacacacacccaatcctaaacctatgaaatggcaacaacaaaaggagaaaatatatcttttgaaaacacggccatctacttggaacattccatagtgtgacatagagtaactctgcttaggattatttcattgatccccagggtccaattgcccagtgctcagtcaaagcccaaggtggaagacaagtgcttccctgatgagctgatgagctggcctctctgcagactgctccataccctgtgctgtcctgcctcagatgcagagagagcacaaggctcccgctctcctcgtcctcggtgcgcctgtgttcttgctaccatcacagctgaatgcaatgaaaggcggtcctctgagaggagcagggtggagatgctaaagtggaggccccctcccattgctgatagatcctcatctggcatgcgctccaccctccccattctctgctcccacatatcgtagccccatcacagaagatgcgacatggaaaaaagcactgtgtccaccctagttcttaaatttgggcagggatttggggtgtatgttaagagtttttcaaatttgccagattgtatgcctatgttgttaaatacacagtgaatctctggtatgatagcagtttctggataaacattacttgaggtcctaaaatgcagaagggaaaaagcaacttttgtcagatgcctactttgctttcatttcatctctaatattttggatggggaatcagccaaggcttctgactgcaggaaggtcaagtgtgccagtgtgcagctgggtttcttttccagaattaaaagcattttgggtggtggtgagggtcagaggaagaagtaaagattgtgagaaagtggaagaagcatgggcttggggagaacccagaattggggccagaagacctggcactaggctacagcacttagcacctctgatcttgtttttcttcatctgtaaaaggaggttaacaaagcttttctgcccacttcttggggagaagggaataatataattggtaaaaaaaaaaaaaagttttgaaaaataagcaacactgactttatgtaaccaagcattattaattctccaccccatatcactggtagatacctgtattcaagctatctggacatgaaagcagtcacattttagaagtcatgaagttgatgctaataaacctaatctacagaaacactcttgaaagcccttgagcgtttgttctgtgaacagaaaggtttgagattcagagcaagttcagagttggatggtctaagaatggaaaagacctccattctattagaagagtcaggtagcaatttctggttatggaaccagaagctctcaggcttcaaataaaacagcatcacttgtactctcataaaactgtaaaaacagaaaaaccgaaaccgtatctacatctgtcctataaggcagagagtacttgagacctcatgaatttaaaaccaccttacaaactacattgcactatatgaagaaattatcactgtgggcaaagcatcaagcagagagcacagtacacagtgtgtggatgttaatgttattctctagccttcccattcctttgtcttggtcctttgtgcatatggaacagttctattattaaattttgtaatagtaactgagaacctgactctcagcaagggagtagttcagaaattgagggagtttaactctgaatgagtaaataaaaataaagcaattatgtcattagcttaaaattttatcatcattaaaaataaaaagtttaaaaacaaatacttaatgtaacaatttatcaccgcgcaatttggactcacgacaatgtatggtgtttgtcagacatgcactgttgcaatgcagcttgactgtcttgcagacagcctcaatgctgtttttaagttggcagaggcagcaggccatatggctaggtaagatcctatagatgaaaacagagagcaataaattagcggtaaagcggttacttgagtaggtaaaggaggcagccaacgctaccacaggtgtgggaaaaaggtgtcattgaagcctatggactggacagttgggtaggaaccagaaggccaataggaaggagggcaaaggtgcccaactgaagggtaagcatggcagtgagtatggtatgcctagaataaagatggttgggattagaattgggtgacagtgattagtagtttaattcagaagtatctcttcccaactcaaaagtctcactttgggctgaaagtacagaggaagaaggtagacttttaagaagtctgaataagcccccaacttctggagtccctttctcaattcctgttgggagtgggaaatattataaattactctgggcattaaaaatagcttagtttaacctcgattgtggagttaaaaaataacaaagattgcattggtcaaatctggacaatttgagcattcaaaagaataacaacaataagttacaacatatttaatataaagaagaatccacgaagagtgatatagaaaaagaaagagggggagttcttcttcaatgaaataatgccagctagtaaatgtagaaggaatgacagaatttttaaaagtgtcactttgcaaccatcagtgtaatacaaattcattcagacaaggattatcactgatgcacatttgggtgaaaagacatttgagaacaggatcttcactgaactcaaagtaacaacccacagattatttattaattaccaagcggaaaattattattttttatttttattttgtcacccaggctgaaatacagtggcaaaattatacctcattgcagcctcaacccccctgggctcaagggatcctccaaattcagtcccccgagtagctgggagtataggcttgcaccaccatgcccagctaattttttttttttttttgtacttttgtattttcagtagtgacagggtttccccatgttgctcaggctggtgtagaactcctgggctcaagcaatcctcccacctcagccttccaaagtgctgggattacaagtgggagccactgtacccagcaaaataattacaatggagagatctggaagttcaccttggtcaagtgatcaaacttagtattacaggccatctgcagttacgaggcaggaaggatacatcacctatgcagtatttttcccaaaaatgcttaacttgaatttcgtcatgaggaaacagacaaatccggattgtgggacaatttacaagacaactatctttgactcttaaaaaatgccaatgtcatgaaagatcaaagaaagtagaagcatgttttagattaaaggaaatgaagacatgacatgcagtgcctgatctttgattagattctgtactattctttcatctttctggcttgtttgaatttttttcaatacgtaaatttgggcaaaagaggtaactgagacaattgattaatttattgttgtggcttattgggggcactttcagagagataaaaacaatccctgtaactgaagtaaaaggttaatcttaggcagtatagcatggtcattaagaatacagattccatagccagactatgcttcaatctcagctctgctaataatgtgaatttgggcaaattgttaaatctctgttccttggccttgtcattataatagtacctacctctaatgaattttgaggatcaaatgaatccatacctgaaaaatgcctggtgcacagtgagtgctcaataagagttaactataattattatgttgcagaggttgtggggggccttttctgagtcctccaaaaggatggctttattggggccacattgagactgtgaaaacagaagagggtttcatggatacaagaagtctatgagttgggggtacaatgtatagagttttagattaaaactgcatccaatgagttggcctgacacatctttcaaacctatagaggaacaatcacaagtgactagtattattcctttgggtccagtggaagcctctgatcttcatatggaatggacccggaaccgtaacccagcattttgttatatagcaaccttacctctgccacaaaggtgtttcttttgtttattttgaggccgggtctcgctctgttacacaggctgagtgcagtggtgcaatcttggctcactgcagcctctgcctcctgtgctcaagtgatcctcccacctcagcctcatgagtagctagaactacaggtgtgtgccaccacgcctggctaatttttgtatattttgtagaaatggggtttcaccatgttgtccaggctggtctcgaactcctgggctcaagccaccctctctctttggcctcccaaagtgctgggattacaggcatgagcccaaaatttttggtattctttttctgcccccaactttttattttaaacattttctttttttcctttaagccttaggatggttgggaaacattttcaaatggtataatgaacacctgtataactttaatctggaatcagtagttgctaatactttgccacatttgctttccgtgtgtgtatgtctatacattttctggacaaaaccatttgagagtcagttgcagacataatgacccttcaccattgaagacttcagtgtgcagcccctaagaaccaaggcattctccgacataaccagaggactatcatcacccaatggaacttcatattatcattgtctactatgtggtccatatacacattttcacaattgtcccaatcataacatggcttaaaaaattcagaatccaatcaaacatcagacattacacttagtacatgattctttagtctccttcaatctagaactgttaccaggattgttttaaagtatactgacaaacctttcagactacaaggaaaaaaaaagtggatagcaaagaaaaaatatgccacagaacttttcaggtcaaaaaccctaaaagtgactatgttggtaggaagccctgactgtggaggaaacactatttctagcatcctccataattcaagttgctcatcataattcgttgttcatctatttttttttttttttttgagatggagtctcactcttgttgcccaggctggagtgcaatggcttgatcttggctgactgcaacctcagcctcccaggttcaagtgattctcctgttctgcctcagccttccgagtagctgggattacaggcacccaccaccatgcccagctaatttttgtatttttagtagagacggggttttaccatgttggccaggctggttttgaactcctgacctcaggtgatctacctgcctcagcctcccaaactgataggattaccagcatgagccactgggctggatgcttgtcttttatctttataaagtttttaaaattcatggcttaatttgcacagttaaaaaaaataggaccaattcttttgctttatagccaaagaagaaggaataaatctaagaggaggaactggtcaaaaccatactcccacttgtcttcttgtatgacatcacagcctttcttacattgcatgtaatcacctgtccacttgtgaggctcctggactatgagcgctttgagggcagagaccacatttttttattttcctgagatggagtctcactctgtcgcccgggctggagtgcagtggcgcaatcttggctcactgcaatctccgcctcccgggttcaagcaattctcctgccttagcctcccgagtagctgggattacaggtgcccgccaccatgccctgtcatccccgtgcctggcatgatgtctgaaatgtattaggcatttaacaaatgtttattgaataaacaaatgacattttgtttgtatgtcaataaaatgaataaattgattttgatgcaaatttttattccaaaatgctagaatcgattttctttttaattctttaaggtgaacaagaaaaataaaagaaacaggaagaaataaaagaaaatctgcctttaggttgacccaagaatcatctttgtacttaggcagaaattataaaaataataattattacagtgagtatctactgggttgccaggtatttgtgatcagcaaacaccttatgtggtagatattattattgccctatttttaaatgaggaaactgaggcacagagaggttatataacttgtcctaggtcaccaagctattaagcagcaaagctgtaatttgaactcatgtgtttatgtatgaagaaaaagggtttattttaaccttaggtttttaaaaaatttttattttcgttcttcattctttttctttctctctctttttccttccttccttccctcccccttccttctttctattttctttcctttcctttctttcctttctcctctcccgtccactcccctcccctccccacccaaacagggtcttgctccattgaccaggctggagtgcagtggcgtgatcttggctcactgcaacctcctcttcccaagctcaggtaaccctccttcctcagtctcccaaattgctgggactataggcacgcaccaccacgcctggctattttttgtgtttttagtagagatgggagtttcgccatgtttgccaggctggtcttgaactcctgatctcaagtgatccacctgccttggcctcccaaagtgctggtgtgagccactgggcccagccttaatattgagaagactaaatacagaagtgcctttcaaccttcttctactcctctgggaggacctctatgagaattacaatttctcattagcagggcatggcagcgcttgcctgtaattccagctgtttcagaggctgaggcaggagaattgcttgaacccgggaggcggaggttgcagtgagccaagatcaagccactgtactccagcctgggcgatagagcaaaaaaaagtggattacagtttctctttttatgtctttcccctaatcatttcccatgattaaatagttaattagtctatggtcgatgagacttctttttttaagagacacattctcactcactgtgttgcccaggctggagagcagtggctattcacagccatgatcccactagtgatcagcatgggagttttgacctgctctattcctgaactgggctggtacacccctttttaggcaacctggtggtctccttttcccgggaggtcaccatactgatgctgaacttagtgcggacacccaatcagcatagcatgctacagcccagaattcctggactcgaaggatccttcttcctttgcctcccgagtatctgggactacaggcatgtgcccagtgagccttcagacatttaaaaccatgttgtaagtgacatcagtgaaaatggtggaataaagacatcgaggctgggcgcagtggctcacgcctgtaatcccagcactttgggaggctgaggcaggtggatcacgaggtcaggggatcgagaccatcctggctaacaaggcgaaaccccgtctgtactaaatatacaaaaattagctgggcgtggtggcaggcgcctgtagtcccagccactcgggaggctgaggcaggagaattgtgtgaacccaggaggtggagcttgcagtgagacgagattgcgccactgcacactccagcctgggcaacagagtgagactctgtctcaaaaaaaaaaaaaaaaaaaaaaaaaaaaaaaaaaaaaagagacatccaaaaattcatcccttcataaaagcaacaaacaccaagaaaagggcaaaaaaaaaaattgaccataataaactttttcagaactctagaaatgtaaccaaagtcttgcagcaacccgaggagcatttattcaagaaaaatttctgtaagaacagtgagatttgtgttaacttgccttagaccattcctcactctctagctcagtagttgccttgaaaaacagcccacatccccaagcagagggagcagaatggagctggagctccttcaaagccttattctcagttaactgtcatgatgtcatctgtctggtggttccctggaagacctcatttgaaaggtttgtctttatttgaccagaatgaaagctgtctagtgctaaagcctctccacagagggtgtttttggaaaacaattacagacaagtgttttaacatggcaactgtattcggcaatgaataacagtttggggaaaaaaagcctaatcgaaaagcttaataggaaaagctgagtaataagatgtccacaggaattttgaaacactctgatatatgcttgggaaactagaagtccataagacatattcctggcaatttgcaatgtcatgcgcatgcatagggcaggctgccagcatggtcaggaaagacctactaagttcataaactctcacccctggctgatcttgaggttctgcacaagcaagaagtgaaagctaaggcatggctgtaaattgtctagctgagtgctgaaggtatgccccaacatgtacacagagccccttggcaaaaactaggagacttatcagttccaagaatttaagtaaatcttcatttaatcattagctgatcggtaagctaaccaaggagatactttagtggcaacacatgacatataatgcaacactttacagaagaagttcagaaaagtcactaaataaatagcaactactaacacaagcagcagtaacaccaaaccctggcagcatggatctgattttcagaattgctacattatattatttaaaatattcaatttttaacaaacatttatgaaagatgcaaggaaacaaagtatggcccaaacacttggtggggggagaaataagcagaaattgtccctgagaaagaccagatattagacttactagacaaagatttttttattttttatagttggggtcttgcgaagttacccagggtggtcttgaactcctggcctcagcctcaacctcagcctcagcctcccaaagtgctgggattataggcatgagccaccatgcctggcctagagaaggatttaattcagctatttaaaatatattcaaagagataagagaaatgattcagttctgtagactagaaaactaaaggaaagtatgaaagcaatgtctcatcaaatagagaatatcaataaagagatagaaaccataaaaaggagtcaaatagaaattctagagttgaaaagtatggtaactgaaatggaaaaattattagaggttctcaatggcacattacagcaagccgaaggaagaatggggaacttgaaggttaattgagattgttgactctgaggaacagaaataaaaatgaatgaaagtgaatggaatctcagagacctgtttgtggaacacatcatcaagcttactaacatacacataatgagagtcccaggagaagaaaaacagaaaaaaggagaaagaatatttgaagaaataatggccccaaacttcccaaacatgatgaaaaacaatctgcatattcaagaagctcaaggaactacaagtaggaaaaactgagggatccacatctaaacatactgtaatcaaactgacagaagccaaagacagaatatcttgaaagcagcaagagaaaagcaactcatcacatacaagggatcctcaataagattaatagctgatttctcttcaaaaacaatggagatgctgggcatggttgctcacacctgtactcccagtgccttgggaggcttgaggctcaagaattgcttgaagccaggagttggataccagcactggcaatagagtaaaaccctgtctctacaaaaaatttaaaaataactgggcatggtggtgcatgcctgcagtctcagctacccaggaggctgaggtgacagcattgcttaagcctgggaagtggaggctgcaacgatgtgagtggttgcaccactgcactccagcctgggtaacagagcaagtccctgtctaaaaacaaagcaaccacacacaacagtggaggacaaaaggcaatgaaatggcatattcaaagtgctgaagaaactgtcaaccaataattctatacctggcaaaactacctttgaaattgaagagaaattaagatattctagataaataaaaactgagagactttgttgctagaagacctgccctataaggagtactaacgtgaatctgcacaaagaaataaaaagcacttgctgggcgcagtggctcaggcctgtaatcccagcactttgggaggctgaggctggaggatcacttgaggtcaagaggttgagaccagcctggcaaacatggtgaaaccctgtctctactaaaaatacaaaaattagctgggtgtggtgttacgtgcctgcagtcccagctactcaggaggctgaggcactagaatcgcttgaacctgggaggcagaggttgtggcgagtaaagattgtgccactgcactctagcctgggcaacagagtgagactctgtcccaaaataaagaaaaaaaaataagaaaaagatacttacataatgcaataattataaatctagttgatgaacataaagtatataaagatgtaatgtgtgacaataacagtataaaggagggggtgagagtggagctttagagaagcgaagtttttgtataccattgaaacaaagttggaattaatctgaactacaacgttataaaattaagatgtagctgagactacaggtgcgcaccaccacactcggctaactaaaaaaaatttttagagatagggtctcactatgttgcccaggctggtctcaaactcctggcctcaagcaatcctccttccttggcctcccaaagtacagggattataggtatgcaccactgcatctggccacaaacattttgtttttttactgttcatttttcttttttttttgagacggagtctcgctctgtcgcccaggctggagtgcaatggcgtgacctcggcttactgcaacctccacctcctgggttcaagtgattctcctacctcagcctcctgagtagctgggattacaggtgcctgccaccaccccctgctaatttttgtacttttagtagacacggggtttcaccatgttgtccaggctggtctctaactcctgacctcaggcaatccacctgcctcagcctcccaaagtgctgggattacaggtgtgagccactgcgccctgctaacatatcctctttctaaaaagctacatatattgcaaagtattggaataggaataacatagcagttaggttgggcgtttgggttgattacatatctttgctattatcagtacaattcttatcaaaatcccagctggcttctttccagaaagtgacaagctagttctaaaattataatgcaatttaaggcaccctaaatagcaaaataatcttgtaaaataacaaagtgggaagactcaaatgtcccaatttcaaaacccaaatcaaatctacagcaatcacagtgtgatactggaatgtggacagacaaataaatcaatagaatagaattgacaacccagaaataaaccctcacatttatggaaaattgatttttgacaagggtgctacaacaattctacgtggaaataatgtttttttttttttaaatggtgctggaacaactgaacatctatgtgcaaaataatgaaggtggaccccctacatctcacacgattataagaattgatgcaaaatatgtcaaatacctaaatgtaagagccaaaacgataagactcttacacaaaaacatgagagtaaatctcatgaccttaaattagacaacagttttttcttctccaaactggattttttttcttttaaaacaattttgtcttttgaatttaatgaagtattactagctgaaggcagcctgacatggtgacaagaatgtcagacagatgaaagggacacagcctgatttaaaaccaaacactgaacctttttaaagaagaataagacattttatacacacacatgacaccaaaagcacaaacaaccaaaggaaaaatagatacattagattttatcaaaattaaaaacttttgtgcatcaaaggacactggcaagaaagtcacagaactcacaggatgagagaaaatattggcaaattatctgttaaggtctaatatccagagtatccagaagatatagagaaattcctataattcaataaaaagacaaatcaattttttaaatgggcagaggatgtgaataaatatttcttcaaagaagatatataaatggctcatatacacataaaaatgttgaatgtcttaaatcattagggaaatgtccatcaaaaactgcagcgagatactactttacactcactgggatggctatgagaagagacagacaacgacagtgttgacaaagaccaggagaaattgaaaccctcaaacattgcagatggaagtgtaaaatggagcagccactgtggaaatcagcctgacaggtcctcaaaaagttaaacataagagttgccatacgatctagcaattctgctagggatgcaccctagaattaaaaacatgtccacgcaaaaagtagtacatgcatgtccatagcagcattattcataaaagccaaaataaagtagaaacaaccacatgtccactaagtgatgaatggatgaacggatatagtgatggctccatacaatggaatatcactcagccttgcaaaggaatgatccatgctgcagcatgggaggaccttagaaacaacatgcttcgtgaaaagaaactagacacaaaaggccacatactgtatgattcgtttatatgaaagatctagaataggcaaatccatagggactcaaagtagattagtagttacctgggcctgcgggaagacagcactggggagtgatggctaatgggtaccatgtttctttttgggatgatgaaaatgttctggggttagataatggtgattgtttgctatacaaccttgagaatatactaaccaccactgaattgtacactttataatactgcgttgatggtatgtggatcaagtctcaatgtaacacaaagaagcatgttgtactgtatagaacaccaggtgccagaagaccaaacatgctggcagatggaaaaaagaggagtgaagattcactctcccttgaccaagatcagagtgagtcagtggcgaggctgggagccacacagcttgtcctgccttgtgatccccctcctcttcctattccagatggtttttcagtgccattaacttgttttgtaacactaatattcaataagatgatgttacaaagagaaagaatgtgagtgccacatgactggttaagtatggattctcaaactagggctttaaatatccttcgtgattttttttggcatgaaaacttgtaagaccactggtgggctctgtacaaagtcggctaccccttcattctatatcttcctctgcccactttcctcccagctattaaaaatgaatgtaggctgggcacagcatctcaagcctgtaatctcagcactttgggaggccaaagcagaaggagagcttgagcccaggagtttgagaccagcctgggtaacaaagtgagaccctgtttctatttttttttaaacaccaaaaataatgactgtaaggcagtatgtagccaaacaacttggcaaagtttgttatctttcctccaaaattctctcactctccaaccttccctctttcttgatagctcatccatagccttgagctcagcattacctctgaactaggaagctcttctccagctgacattaggatctttgcatttgtccctaatgaaatcaaaatatagggccattcgatattatcctcttttcctcctgttctaaggcattcttttcttgactaaggttgtgcctgggccatggagagactgagtgggaactggctcaacggctcaagtttgaggactctacagcaactcttttccacaaaccaaatgatatgaatgtttttatttatttatatttatgtttccactttttaaaagtctttttgtagagattggggtctcactttgttgcccaggctgaacttgaactccaggggctcaagcgatctgcctgtcttggcctcctaaagtgctgggattacaggcatgagccagcgcgcccagcctcgagtgtttttagattcacagtagatgaccatttccatttctggttcaagtccttcattttatacattaaactaaggtgcactgactcccagtccatcgcctttttggtatctttatggaagtaaaatgtggcaagctttttttcagcctcaaagactgtctcagagtaaaagtttaagaagtactgctctaaataattttattaaatatgccttattagatgaggaaaactgaaatatttttatacaagccttttgctgtagaacaatgggacagaataaaggtagctcacaaaataagggaacatttcttgcctgttttttttttttccctccaaattcttctgtacaggtccagatagatgagctatgtttcctttctattaactgaggagacagagatgaaaggactggagcatgtcatcactgtcttaaatgtactgaaatcctaacagctctagctgaaaaaatgtccaaagcaggccgtgaaaataaatttaaatgacaaactccaaaatgatctatgctagaatcccaaggctgtcagggaaaactggttccatggaagaaggtagtcaaagaaataagcagatgacctagaccctcacccaatatgcgcgatgtacttggggagaaagtaacctctttcctttattcacctacataggttcgtgagccacacatctccccacaccaagctcctccatacaagacctcggactgcatcatgtaaatgctttttcaggggcaaaaactagagaatctgaaatggtgagcctttttccttttttttttttttttttgagatgaagtctcactctgttgcccaggctggagtgcagtgcagtggtgtgatcttggctcactgcaacctccacctcctggagtcaagtgattctcctgcctcagccttcagagtagctgggatcatagatgcccgtccccatgcctggttaatttttgtatttttagtagagacagggtttcaccatgttggccaggctggtctcgaacttctgagctcaagtgatccacccaccttggcctcccaaagtgctgagattacagcatgagacaccatgcccagctgtgagcctgtatcttaatcaaagtcctgagaataaccttgaagaagactcccttgcaatgagcaacaacagaagaagcaagggacctggaatctggcagacctgggtttgaattctggctctgtcactttctggtgaagtgacttgagtaatgaacatgagcctttctgggtagcatttacagcacaaagcaatttgaggaataaatgaaagagcacgtgtctagtgcctagcaatgcgctggacacagtgccggtgctcagccatcatgtcacaccagcactgaccggtgagcataaaccctggggatgcccagagctggtacagccaggagctccagaagcgtgggattctcagagggaagtggagctcactgctctacaggtcctattcaagttagaaagtaagatacaatgcacacaaagccaaattgtcatcattcagctcctattacaggggaactaagagctgcattgaaaattacttgcaaagcttgtaagtggttctgccacttattagccgtgtgaaccttagcaaattacctagcatctctgagtttcaacttcctcatctgcaaaatagaaatgataataataactgcatcgcaagagttgttggaaaaataaaaatgaggtatcataggaggtaacatgtatggagcatttaccataggccaagcactgttctaagaacttcggacatgttatctcactggtataagtacttaggtgcctacaacataaacagcacctggtaaattaagtattgaaaaaaatgctatggggcagaggaagaaatgctaagcttctgtgagaagagaagacagcttgttacacaggtgaaaagaacaagctgcagctgagagaagaaaagtatgagttgctaggtgtgacaatctcaagacttttcaaccactacaaatttaaacagccaccctaaatcaccccaaaggacagactcgagttgttctttttgtctttaatgtttgcgcctctccgaatcagagaagaagctgccaggattccagtacataccaaaacatgatgacaataccctcaactgtgcaaacttttgtgcatctaccgctatgtaaaggaagctgatgtcagtagactggggggaacagtaaggcatgtttgtgaccgaagctcaatttgccatcacagtgtggccacacctacctcactaatattctaatagtgggataaataattcaatagggataaagcctggattttcctcttattctctcttagtgcttacattcttggcatgatatcgatgtgccatagacaagccaatatgtgagtgtactctatctgaataaagtatagcctttctacattgcaaagtcatccagtttctaaaattattgttagaaccaatgaagtgactaagagaattttaaaaaataagccatcagtctggacctgtgtataggaatgaaggagaagcactttaaagtcagggaaaaaatataaacatacttaacatttaggattatcaaccattgctgcttttccataaaccatttcattcatgatttcatctgtaagagatatgattattgcccccattcagtgagggactttgatagttagccgcctggtccttcttgcttggatgccctgcaaataaatgtcctcctttccccagtgcaaaacctcgatatggttgtttgactttactgcgcttgggccagcagaatccagttaagtccactaataagctcttggcctgtctttgagatggatttcagattcaaaatagactgaccctatcaccctgctaacttggccagtcagtatttgtcaataacatagaggcttcattcaagagatttactgggttgtaactattggaacccagggatgatttcaggattttgtggggcctgagccttatctagtaaaaacattaaaaaaattatgactacaaaaatttccaggggccctcccaggaccttggaagggcctgtgcaagtgagaagcctggaaggttaggctctattcaattcatcatcgatcaaccacagctggggcctctttttttgtttgttttttataaacttgtgtaatgcagggaaatatattgtttcaacttacaaacaccacaaaatggtgtcatattggtcataaaattactggcaccttcccttggcatcttgcctttggaaggaaatgcagtgggcctatatgtcacatatgccaaatatgactgcagtgtagctttgtttaccaggaagatttgactccaacggagcccagcccctaacatacacttgatgtgttgagacccttgtgccaatctttgaaagtaactgtgacttagtttgaagggtacagctctattctgtttatatgaaatgagtgctagtttccaatatcagctagctctgattttttcatcaccatgaagcaaatgcctttttctgttctttaagatgaacacagaaactcaagataagcaagttagtgtctctcaagtctttcttaacccagcccccattcctgctttgtcttctccttgtcaccctgccgtacagatccccacatggctctcatatgttttcccatcagcatccgcttcctccttgaggaatgaaagtcccctggggacaaagtcctcatcttggtgtgtctttgagatggattttgtagccccagcacttagtacagtacgtggcacaaatggacatggcactctgaatgtttttgaatgaattcattaatttttatcaactgtgattccagtgttttcctggtgttgcctacgtaattgtagtgaagctggctagatgatgatgatgatgatgattattattattattattattatttgagacagagtctcactctgtccctcaggctggagtgcaatggtgccatctcggctcactgcaacctccgcctcctggtttcaagtgattcttctgcctcagcctcctgagtacctaggattacagttgcctgccaccatgcccagctaatttttgtatttttagtagagacaggtttcaccatgttggtcaggctggtcttgaactcctgacctcaggtgatccacccacctcagcaaagtgctggaattacaggcatgagccactgctcccggccaccagatttttatgagggactcccagtggtataaagtgcttagtaaagatggtgagtttaaaacatttgtattgatgctacctaaacctcttggtggagggacctaatgagcctgttctctggtgtgagggcaaaagaaaaacagacctttagtgtacttttcctaagttatgcatcagcaaattaatgaggacagaggggagcatgtgcagaaactgctgctctagtccagacacatcctgaatgcctccctctaacttgaaatgaactgtgtgaaactagatttctgaaccacaaggcaggtggaaagtcttttctaaagtcagatgtagaggagaatcttcaccttgagtccccttcaggccactgaatatacccactctgatttgatgggtatgttatacagagaaatcatagaatttttgcaattatggtagaagagtagtcaggaaagtatatggaattaagatacagcgatatattttctttacaaaagtttttttttgcacaatagcttaacataaacaccatcttggccaggcatggtggctcacacctgtaaccccagcactttgggaggctgaggtgggcggatcacctgaggtcagaggagtttgagaccagcctggaggggaggttggagggtagtggcacaatctcggctcactgcaacttccacctcccgggttcaagccattctcgtgcctcagcctcccgatagctaggatcacaggtgcccgccaccatgacctgctaatttttgtatttttagtagagatgaggttttgccatgttggccaggctggtctcaaactcctgacctccagtgatcctcccaccttggcctcccaaggtgctgggattacaggcatgagccaccattctggccctacaactttggatttgattcctgctcatatgcagagtttctaactgcttaaatgtctgcaacatttagctgcaaggaaggaagcttaacacaaagtcctccagggagcaaaaaactgcaccaccacgcccagctaatttttttgtatttatagtagggacagggtttcactatgttggccaggctggtgttgaattcctgacctcgggtgatccacccacctcggctcccaaagttctgggattacaggtctgagccaccccgcccagcaacaaggctaatttgagggtcacttctttgatgccttttcttgcccatgctataggtcagaactaggacaagcagaggaggtcatatataagctacgtaagtctcttggcctctttgtaccttagcttccccatttgagaaaaatgaatggatcttaagacacgcttttcagagttgataatgggcttatacccagctacccaataattgtatgagtttttgtacataaatagttgtttacatgtattcatcttctatttcacttacaacttatgtaaaaactgcattccgtgccaggcctgaaatgttccaaagctgagttctgtaattacattgcaactaagatttctaaaaaaaaaagacacaagccaaagaaaaaaaaaattatttcagaacatttatcatttgccatgattctaatttatataggatggaacataacctcaatcctttctctatgcactaaggaaatctgactgtggaagatactggcttatgatttatactttaacactgcacatgtggtgcattagatacaaaacagtgaatgctcagtaaatacctgtgttaagtgatctttatttctctagaacaggatttcacaacttcagtgccatcaacattttggactatataactctttgccatgggggtttgtcttataccttgaaggatgtttagcagcatctctggcctttgcccaccagatgccaggagcacacccacagttttgtcaaccaaaactgtctccggacattaccaaatgccacctgagtgcaaaatcacaccacctgagaaccactgctctctgatgattcactaagatctgtgtaataattctcacaataatccttgctagagacaaaaaggatttgctgtataattttagtagctttctactggtaaaattttaatcatatttcaagaatagcaaaaaggtttataattaagttttataaaaattccaaatgtaatcaagttatatttgtaacttacataaacttcaaaaatggtagtggttcaaatgtatgtctttcaatagactgtattttattgcaggataaatctctaggaaaacaaaaatattgccttgattagttattaaatgtcaattggtatgaataacagcaagagtttagaataatactgaatacctatttttcatctcaactctaaacgtttggacttgtattggaacattccagagcccctaaccctgcccatacctctcctagagtctcaccttcatggttttaataaatatacaacataatagactttggaattaatttttcctgagagcagtagacttgattagatgcccttttgtagtgtcatcaaatcttagattatgagctcaaagattttatctctatatacacaatttctaatattaaaaaaaatagtcgggccgggtgcggtggctcaggcctgtaatccagcactttcggaggccgaggctggcagatcctgaggtcaggatatcgagaccatcctggctaacacggtgaaaccctgtctctacaaaaaaaaaaaaaaaattagctgggcctagtggcacgtgcctgtagtcctagctgctcaggaggctgaggcaggagaatggcatgaacccaggaggcggaccttgcagtgagccaagattgcaccactgcactccagcctgggcgacagagcgagattccgtctcaaacaaacaaacaaacaaacaaacaagtctcacatttctacaccttcttagtttaggtctgttttcctaagccacttcaatatcagaagaaataaaagacatcctttcacatcatttgaaaggaagctacccctttacctaatacataactttgaactaattcaaatcatattaatagaattaatttctatcatattaatagaaattcatttttggttttgtattgctttaatatttcataaaaaaaaaatttcttcagttatacagtgatggagtttgtccctccctctttacctggatggtgtaacgttgtctggctgatatctccatctctagtctctccctacctaaactatcctgcacacagtcatcatataaactctccagaagtggcttgcaaagaccagcatctcctgggaaattactgaagatgcaaattcttggtcccactctagaccaactgaatcagtaactacgagggtggagtccagaactgagttctaacgtgccctctcaatgactgtgatgcagatctaccttacagcgctgctgtggtaacacggttccccatgttggctcctcagcttggcattcaaagctctagaagatctggctccattttcctactctcccttcttgtactctacgggtactcatggcattccttgaatactttcctgtgttttgccctcccattttccttttgcaagtttagagtattttccccaagatgtctgtctgatgttacacaatggcccttcaaagtcctattcaaatggcattgttctagtaacatcctcctgggtccaaattgaaggcattttttcctcttctatgttcgagaaacaatttatccctcctagtgcccacatccatttcttcttcttaatgtagttattttttatcccatttcttctgagcataaactccctgaaagcatggactaggtcttgctcatctgcattgcccaccatgtttaaaactgacacatggaaataaagcaaactcaaatatttgtaaaataaatgaatagctgggggagtgagtagaaggaaaataactattttaaaggaaatgtagttttattatttcatggtctctgtagcactttggcatccacctgagggtctttacacccactttccttaagccttctatatttgaaagaatctgtttgcaaaagagcatcactaatgagcttaataaggattaatgacatacagacctctatggacaaagggtaagaatcaagctttcatagcaatgaacatagtatcttcttgtctctaaacagacagaaatacagggatccctttctggtaacagggctggggcgatcgttattttgtaattagtgaagagttaggggcatttctgatgtgcttcttagtgtaaacatttctagctctaccagttaaccatcattttaaacatctgttttaatataacaattcctgaaatgaaatccttaataccagtctattctcttggtagcttaatattcttgataatattattgatataattcagctatttttaatatttaaatgttaatttaattccgattaaattaccaaaaaattctggattaatgatgttcaaatgaatgcaggtggtctccattttcttctcctttaggcaaccatctgaagttaactttagttcctttcatcctactaaaccaactttttgaaattttttttggtgaaggtcagacagtaaatattttaggttttatgggccacatatgatctctcgcatatttctttgtttcttttctttttctttcacagtccctttaaaaatgcaaaacccattcttaacttaatgggctatttaaaaatagaccataaattagattggatctattggttgtagactgaatagaaaaagaatgatatgtgaacccttataaaacaaggttcatatgggtgtcagtcactgctcagattttcttaccatgtgaaatgtttttgtctgtattttgtctatataacttaaaaactgaaaatgcacaggaggtagctagtgctagagatgggctgagaccctatacaaacttacagaattgcagaattttattgctcaaagaaatctgagagattatctaatttgaaccccttattcattttacagataatatgactaaaaactcataaatataattaactaacttacaaatactggagggatagcaggccttcaaatgaatccttgtgtaattcagtcaagttattttctctgagaattctggaaaatgaagaagttatttctagattaaaatgcaaactacaactatttgctacacagaaccatctcctgcatgtggaggaaagctgggtcatggtcacttcaagatggtgggatctgctctgctttcattcaaaccttttcttatattttcctttttgtgtccatctctctccaccaccaccacaaacacacacacacacactcaagcacaccccttgaagagtgggtttcttcccaccaaattctattatttcatgcctcctctctagatcacaaaatcccttttagaatccaactctgggtggcaccaagatcagcagaacctccatttcctcctctcttttcccaaaccttattatgaaagccccacatggaaccatgtcagggctgcaagtgaagccattcaacctttttccccccatcaaaaaaattggagaactataatgtgcataaagtgcacataacataaatgttgtttatatttaatttaatttaatttttgagacagggtctcactctgttcccagactggtctcaaactcctggctcaagtgatcctcctgtgtctgcttcccaaagtgctgtgactgcagacatgagccacctcacctggccaaaatattcagtttaataattatgaagcagatacccatgtaaacatcgttacaaaagatcattgctagcatgccagaagccccagtgtgcccctttccaatcatatccctctctctaaccctaataggtaaccactatcctgacctttgtaataattttcttgtttttaaaatgtagttctggcctggcgtggtggctcatgcctgtaatcccagcactctggaaagccaaggtgggtgaatcacccacggtcatgagtttgagaccagcctggccaacatggtgaaaccctgtctctactaaaaatataaaaattagctgggtgtgatggagggcacctgtaattccagctacccaggaggctgaggcaggagaatcgcttgaacccgggaggtggaggttgcagtgagccaagatcgcaccattgcactccagcctgggcaacaagaacaaaattccatctgaaaaaataaataaagccattctcctgcctcagcttcccaagtagatgggattacaggcacccaccaccacgcctggctactttttgtatttttagtagagatggggtttcgccctatcggccaggctggtctcaaactcctgacctcaggtgatccgcctacctcccaaggtgctgggattaaaggtgtgagccaccgcgcctagcatatgtttatttttaatttagaactcatcgtggcttgtctatgtacattgaaataatgatgtgacacacaaactgttgtgaaaaatgtcagttactttgaatgtaagcattttttccaaaatcacttatgtgtctaaaccaattccttctataaatcagtaagaaaatgataaaacaattcaacaggaaaatgaacaaaggccagaaaactcagagaagaaacacaaatgttcaataaacatataaagatactaaattaaattcatgagtaatcagaaaaattcacatttagatggaatcccttttattcatccataacttcagcaaaaagttggagaatacccagcggtgaaaaggtgttgggaaatgaatgctgtcatattctgctgacaatagagtaagttggcacaaaatttttgaaggcaattaaaattttatatctacatagtcttcaccccaagaattccatttccagatatctatgctacaggaatacttgcacatgttcacaaagaagcatgtacagggatttcattgcagcaatgcatgtaacaagaaaactaagcataatctaaacattcatcaatgggggaattattaaataaaccatgatgcatccatactatggattatgcaggagtttaaatgaatggggtgaccctctaagtactgggaaggaaagaaatctaaggcatatcatgaagtgaaagaattaagttgcaagatgttaccctttatgcgaagaaaaaattttaaaaccacaaaacaaatctattttgctttatgtaaatatgtatgtaggtaaatgaggaaaagtctggaagcatgtatactaaatgcagagtagcattacttcagggatgagggagtagggcacaaggagagtttttgttatatctgttattgcatttttatatattaaaaatggaatcatgggctgcgggtggtggctcatgcctgtaatatgaacactttaagaggccaaagtgggaggatcacttgagcccaggagttcaagaccagcctaagcagcataggaagaccctgtctctacaaaaaatacaaaattaggtgggtgtggtggcatgcacctgtggtcccagctactggggaggctgaggtgagaggatcacttgggcctgggaggtgaaggctgcagtgagctgtgattgtgccactgcactgcagcccagaggacaaagtaagaccctgtctctgaaaaaaaaacaaaaaagagaacaaaaaggaatataaccatgtactatttgtatgataaaaaataaatttaaattgcctcttattttaaagagagcctaccaaatttaattttaaaatgaccatacaattgcaatcaacagtggttgatttggggcatggaggagaaatatctttcctcagaggtaccgacctcaaaattctggaccaagaaggatcttacaatgcagttagctttttgtcatatttggagagaatatactcacagtttctcagtccaactgtatgctttccatacatttccatcaatgtaagaaatatagtttccttggaaatttctgtgaagaaacacagtttatatccttgaataggtaggaaaacaatgaacacgataagtaaaagaatcattgcaaccttgttggggatattcagaaacagaaaataacacctgctttctcatttccagagctatcagcttcccagtttgcacaattcatcaagaaattatgcggggtcactggcacaaatgatgaggcatctcctggaagcttaacttcttatccatcccatctcttggacagatgatgccagttaattactttgaatgtaagtattttatctaaaagcacttatgtgtctaaacagacttctacaaatcagtaccaaaatggtaaataattccacagaaatatgggcaaaagcttatcattatcaacaaatgagaagaaagaaaccctatgccaggtaacaccaaagctttggcccagtgccctctgttgaaacatcctaggctttttctttccactcctattacaactgatctgatttggccccttcacacttcactcctagattttgctagacctttctattttgtctccctgaattaagcttttccttttggacactttacatatggattctaaaacaatcctctgcatgtctacacttgcacataatgcaaaaaacaaaataaaataatcttcctgttttgatcatgtaatctctcttgcttggaaactttcaatggctttccatacctcattgtgtaactttcaaactcctatagctgataatcaaggttttacagaatcgtatcttcattgctccctcacctaattctttgtagccacattggtctactaaattccaaccatacctgtagccatgcgtttgcctagactgtactcccatttttcttctatttaacaaattatagctactctttaagacccaagtaaagttttagcttacccatgtagcatctccacacctcaaggatcacagattctggcaaattctagcaccaatggtctgcattatcttttagtacttaattatatatacctccctttttatgcctattctctttcttccctcctatcatttttttttttttttttttttgagatggagtcttgctctgtcacccaggctggagtgcagtggtgcaatctcggctcactgcaagctctgcctcccaggttcacgccattctcctgcctcagcctcccgagtagctgggactccaggcacccaccaccatgcctgactaatttttttctgtatttttagtagagatggggtttcaccatgttagccaggatggtcttgatctcctgacctcatgatccgcccgcctcggcctcccaaagtgctgggattacaggcgtgagccaccacacccagcctcttccctcctatcattttcgtgttctggagacagtagcatacttggccctgggtttgacataaaactagttctacatatagaaagctagggacaaaaatgagttctggacaaaactaaaggactgaataatcatgtgaacagccaactctcctacatatgctaagcactgatgaagtgtttcatatattcactcacctaaatttcacaacaatcctatgaaatgctaactagcatgatccccagtttaaaggtgaggaaattgagtcacaggcagaataacttgctctgggtcaccaagctaataaatagatctgggttcaaacccaggcagcctggctccggaatcaactcttaaccacttagagcatcatcactgagatcgggagagggacaggctgctgtaaagagggtgaagcgaaaatgggaggagagcagcggttaagcaatgatgtgatggggctaaataaaaatggatacaaaaacgagtaaaagaccagagtaaaaggaaaagactggagaagggacctaacattaaaagagaatgaggagaagggagagttgacaagcaaaggtgaaagcagaaagtcagttgtccatatggcttggggagataaagaaggcccaggaaggcctccaggaaaaggctgccatgtcaggcaggacacagaggacaattgaggaaaagtgattcttacaagatggtgaaggtgccattgtgggtgttgggctctggcacaggcacttggcggagcctctgctctgggttgagatcaatacatgacaacatctcatctccgcaggtacagagctcacatatgttggtgcttgtggaggccttctgttcctctggtgcagttaaagccttattttgggtgtaactttcagactgcaccagtgaatcctgagcaggttctagttcagtaggtggacctgtgacttcagtcaggcttcgatgcagactctgaacccggtctggatgaggagctgtagtcttctccagggctgtagaatgtccagtctctgtagtgggttctggaatgatggcaagtcccaggtctggaggctgagttgaggtctcctctgtggttggagatggtttaacctctgtagtaggttttgtagttatggtaagctccaggtccagaggttgaacggtggcttgagtcaggtgtgaatgctgagcctgacccttgtctgaaggtggaagtgtcacctcagggtgtcctggaggaggagctgtagtcatcagggctgtagaaggttcaacctctgtcatggattttggagtgatggtaaaccccaggtccaaaggttgaactgtggctcgagtcaggtgtgaatgctgagtctgaacctggtctggatgtggaagtgtcacctcaggatgctttggagaaactatagtcctcttcggggctgtagaatgtccaacctccgtagtgggttctggagtgatggtaagtcccaggtccaaaagttgaactgtaacgctgggtgacactggatgctgagcttgatcctgacctggtgttggatttgttaccccttgatatactcgaagttggggtacaactttcttaggaggctgagttggggtctccttcatggttggagaaagttcaacctctgtcatggattctggagtgatggtaaaccccagatccaaaggttgaactgtggcttgagtcaggtgtgaatgctctggaggttgagctacaactacattagggaactctggagtctgagctggggcctcctgatgggttagggaagactcaccctcctcagcggtctgtggatgctcagctgcagcctcctgctgggttggagaggggttctcattattaataggttccggagattgaaatgaagtctcctgttgaactgctaaaggtccagcttcttctgatgactctggaagcagaggtgggcccccgtgctggatggcgggaggttctacatcattacctgaccctgagagccgagctgtagcctcctggtggactagagaagttcccacctctgcactaggctctgctgctatggtgagctgcacgtctggaggcttcacagagacactgggtgaatctaaatgatgagtttgatggtgacctggaggtgaaactgtgacttcatgatgttctggaggctgacctggggtctcctgctgggtcagagaagattcgacctccctagaagactcagaaggctgaactggctgctgctgctcactgatggaaagttcatgctccataggagaaactggaggctcaattggggcctcctgttgggttgcagaaggttccacctcctctggaaactgaattggggtctcctgctgggcttgggaagattctgtctcattggtaggctctgaagttatggtaacctccacatctgcaggtttaactgtaatgttgggcaagtgataataagcttgatcctcacctggaggttgaactgacacctcatgattcggtagagttagactctccatagaggactctggaggcagagctggggcctcctgctgcattgaagaaggttcttcctcaaggagctgtggaagctgtgctggggcttcttgctggagtgaagaggactggatgtcttcaagggtctctggattttgagtttcgggctctagatggaattgagaaggtccaacttgctcagagggccctggaggctcatctgacttcacccggagttctggaggcaggctactgggatacggtgtatctgtactggaatattcattctgcaaagtctgtttctgactctgaggtgtggataattggcgtgcaattccaataatctcagcaaggctccaacgctgagctggatctttcttcagcttcttgggcgaaacagggagtctttcctgtggactcagcttgtcctttaaatcctgctgtgaagccaagaactgctctggctccaggggctgctctccagctgaatcccaggtgtccaggaatggaaccaaattttcagtcgattcctggggtggggctggcatctctgaggaagcagagggccccaggtgatcaaagtcccacgggtctgctgggagagtaggcgcatggggagattcccgtgggaaatgggaggagtgggaagaccaggactcaggcggccccaggggattagaggtgagctggagcgggtccttgacccactccagaggctgagcctccttaactagtagccacaatagttgccacataaggaggggccatgggccccagaaacgcagccgggacatgacacacactagtgccgggcactgagcagaagacattctggcagctccgagacgctcgtgccccttctaagcgtgagccccgccctgtctttatgacacctttatttatgtcacagatctgctccatgtcaccagggcactcttatgtcacaatcccgcccaagcacgccttcccatcctgccctgccggaacacccctctcctccccttagtgaggaaggatttgggcctcagaccctggtggtcccaggactccagcgcctgctgtggtggggtagggtggggtagggtggggtgggggcgtggcagagcttcccaaggaagtcaccggacctcgcctcaggatattcagaagtgctagttcagttctggcagccttcctcctttaaggtgaaatccgagaacactcttccttccagggagagcaactgacctgcaaaatgggcgccaggatgcacattacagtcacttattccaaagtgttgccattttcgctaaactgtcgcatgtttgataattaattcaccaccctattaggtaggggctgccagggaataagcgaggactccaaattttctgtaggaggggtgttgggagttggcaattcggtctgggagagaaggttttaatccgagtgaagagccctttgcactagcctgggaggaggctgaactgtcatcctgccttgactcaacacagccattcccctagaagttacagcacttctagggtcacctgtgttcagagatctaccctgtgtgcacacatggagaagaggcttaggttgttaaagtcagcatgttaaatcatttcctgaaatgcgactgtaactagaacccagctgacttcccccacagccgttcttacctattttattactgtctggcataattaccagcatgtaaactccaagaaggtgcttcatcttattttagtgcctggcatagacatagggtgcatagtgatggctttaaaattgaaggggggccgggtgtggtggctcacacccataatcccagaactttgggaggccgaggtggggggatcactgaggtcagaagttcgagaccagcctaaccaacatggtgaaactccgtctctactaaaaatacaaaattagccaggtgtggtggtgcatacctgcaatcccagctactcaggaggccaaagcaggagaatcgcttgaacctgggaggcagaggttgcagtgagccgagatcacaacattgcacttcagcctgggcaacaagagagaaactccatctcaaaaaaataaaataaaataaaatggaagagattccaagattcacctcatttagggatggagctattgttataatcagatttctgaaatgagtgctgacttcctctcacatttcacaggaagctagacttcttaaagcttgaagtctccttggtgggttttatttaaattgaattaaaataattattttacagggaaaaatttcaaaacactttgcaactttggggtaaaagttaaataaaacactgtagccccaagttaagttcccactgaaatgagacttttgctcctttttttaaaaaaaattccataaatagtaaataatgactgttttgagattaatttagaaacaatccctatttaagagctttcatatgcagtcatgcattgcttgccacgtgaggagcttgagaaatgggtcactaggtgatttcaccattgtgctaatatcatagcgtatacttacacaaacctaggtggtgtagccaccatacctagggtacacggtatggcttaggactcctaggctacaaacctgtactgtatgttactgtactgaatactaaaggcaactgtcacagaatggcaggtatttgtgtatgtaaacatggaaaatatatagttaaaatactgtgtaaaagataaaaatggggcctgggcacagtggctcatgcctgtaatcccagcactttgggacgccaaggtgggtggatcacttgagctcaggagttcaagaccagcctggccaacatgatgaaaccccatctctactaaaaatacaaaaattagctgagtgtggtgacgcgtgtctataatcccagctactcaggaggctgaggtaggagaatcacttgaacctgggaggtggaggttgcaatgagctgggatcataccaccgcactccagcctggacaacagagtgagactccatctcaaaaaaaaaaaaaaaaaaaaaaaaaaaaaaaagataaaaatggtatacctatatagggatagctccattatacgcttacggaaccaccatcatatatgtggtctactgttgacgcaaacttcattttgcagcacatgattgtaaatgattgacagaaagatcttcagcaaaatattccacccaagatacgtgggagatattgagatccaagcaataagccatatttgaaaggcattatagttttcaaaagctgtagcgcaatcattcttaaggccagttaccttctccccacatctctgggatcctgtttgaagggagttctaacaaggcctgtgttcgagcagcccagcatcccttactcctggagcggggggagactaacccctctcctgtgtccacaactgtagtaatacaatcctcggttctgctctccaaacttcaaataaggggtcagagccaagggttaagactttaggaaaagccccggaaataccctgcactcaaaaagcagtttcagagtttcacattttcctgagaattaaacaaattatcctccaaattctgctgcttgttttgaattatggttatactggcaatgttatccaacccttgagttgtttttcttttctttttttttttttcctcgagagagtgtcttgctctgtcacccaggctggaatgcagtggcatgatctcggctcactgcaacctccgcctcctgggttctagtggttttcatgcctcagtttcccaagtagctgggattacaggtgcccaccaccacacccagccaatttttgtatttttagtagagacagggtttcaccatattggccaggctggtcttgaactcctgacctcatgatccacccacctcggcctcccaaagtgctgggattacaggtgtgagccacagcgcctggcctgtttgttttttgagatagagtttcactcttgttgcccaggctggagtgcaatggtgtgatcttggcttaccggaacctccgcttcccgggtccaagcgattctcctgcctcagcctcccgagtagctgggattacaggcatgtgccaccatttctccatgttggtcagtctgatcttgaactcctgacctcaggtgatccacccgcctcagcctcccaaagcactggcattacaggtgtgagccactgtgcccggccctgttacctttgagtttttatctccacatacttatattaaaccgtgtagttcttcttcccatctgacatctacaatctcttcactgggtctgtactccatagctattttaccactttctgaaataaagttagcaaggatgaattcagaatctttttcattccaaaacttcctgcatataatggtagcaacccacaatgagacattcttttagtttctaaaagcaggaaataagcattttcctgaaagtttcctcatctcttcatcatacacttcgatttttgtttttcttttttcttttagacagggtctcactctgtcacccaggctggagtacagtggcactatcatagctcactgtagcctggaattcctgggctcaagtcatcctcctgcttcagcctccagagtagcaggcactatatcactgtgcccgtctaattctcttttttagagacatggtcccgctttgttttccaggctggtctcgaactcctggcttgaagtgatccttctgtcttggcctcccgaaatgctgagatttcaagcgtgagtcatcatgtctggtctcacagctcagtttttaacatatgtatgaaatatcaactgtgtttggttcaaaggactttatgatcttacagataggaactaaggaataataacgtaagaaataaaaaatgtggaaataaaaatgttcaatcataacatgattaaaaggtaaggcaccaggtggggggtcgaagtaagttcaaatccaaaatagagaccactgggctagtagacacttcacattagaagcatggctaggtgtctactccctgagaaccaaaattccaccagatacaatgaacaaagctttagagagagaaaacatttgaacattttacgggcagaaaatggcccacatactctatagacaatacaatttccttcaaggcaaactagaactataaggcttttggtctaagaagtgagtgtgtgcaagggatacctttgcatactagggaggggtagacaacccacacatttagcttggttattaaatgtcattactcagacttgacagttgatgaccaaggaagtaagactttcactagaagggctgcccaggttggaaagctgagagcaatcagggccacctcttacaagcaaataaaggtctgtagtaacttaattacaatctcagtctctaagccttcagggttgtgaagcagaaaggcaactctgttcagggactcgttaaacaccaggtttcctttgggcacaggctatgacatttgtgccactgtagaactgaataggaaatacaagcagtgccattcaacagcatgaccacttccaaggctcacagcaaagcagctgattattgtataagaatcatatttggccaatatgtcagtgccagaaatgagagctggaactgaattctcgattcgagaaacataatctaataaattcttcagcagagtttatttattcagagagaaaacaatcacaacaatagcatattttgtctgcttaccttgtaagtatagttctgagtttttacacttgtcatctcattttttcttacaatatcagcaataaggttgattggattactaaccccagtttgcagataaagattgcagcttagagatattaaatatcttcaaatctctctggccataagacctaaaactgcatacaaaaatctaagagacagagttaggactcaaatccatgtgtccagggcttataatcactattctgtacgataggcatgcaattaaagaagacctgcctcaaacattttctgtgtgacctgaggcaagtccttttatagctataaactagggacaatatttgctgtcattttttctacaaatgtcacaaagaacaaatttgagcctgtcgctgtgaaagaacttagcaaatgaaagcatcctagggagtgttttagatatcgatatttttatccaattaacttttcaaaatgagtttatttgctcactgaaactgaagtacttcaacgacgattaagaaagttttacctagaaccacaatcaacagtttctggaatgcatctgacaaagccttctcaatagcaatctgggctatcttccctttcataggaatgacaacggtcttaaatccaacccaaactaatggatttaagatgcctatctgagtgatcattgctacatgttggttaaaaaataaaaatgcatccacgaatcttagctcataatcttcgtgattaaaggcagacagcacaagggtatggttgaacgtctctgttataggtacatcctggcagggcccatttttactgcctccatctagttgggaagttcctaaagtactagagggagacataagccaagaacctggcacatatctcacatcacccagagatttaattcatcagttaaggctacactcctatggaccccaccctcctatgcatcaagggctggaatcactcactgaaaaaaagctttgttggctggacacggtggcccatgcctgtaatcccagcactttaggatgccaaggcgggttgaggccaggagttcaagaacagcctagccaacgtggtgaaaccccatctctcctaaaaatacaaaaattagccgagtgtggtggcacacacctgtaatcccagctacctgggagtctgaggcacaagaatagcttgaaccgggaggcggaggttgcagtgagccgagatcattccactgcactccagcctgggtgacagagtaagactattttcaaaaagaggccaggcacagtggctcatatctgtaatcccagtactttgagaggccaagatgggcagatcacttgaggtcaggagtttgagaccagcctgagcaacatgatgaaaccctgtctctactaaaaaattttttaaaaattaaaaattggctgagtgtggtggtgggcaggagggaggtgaactgcttgaacctgggaggtggaggttgcagtgagccgagatcacaccggtgcactccagcctgggcgacagagcaagactctgtctcaaaaaaacaaaaaaggtttggtacagataatctggctcctccctgggcatcatccatgaaagcctactcccctccattagcctacagccctgcctctgacttcaaaccctaagcctgagggccatgaatactagaaaaaaatctcaacgtcagttatcaattgagtaccctttctagtatctctagtagactcttgttccactgaagcccttctacgagtaaaaaaaaggctgaatgggccgggcgcagttgctcatgcctgtaatcctagcactttcagaggccaaggcagatggatcacgaggtcaggagtttgagaccggcctgaccaacacaatgaaaccccatctctactaaaaatacaaagattagccaggcatggtggtgcatgcctgtaatcccagctacccaggagtgtcaggcaggagaatcacttgaacctgggaggtggaggttgcagtgagccgagatcacaccactgcactccagcctgcgcgacagggcaagactctgcttcaaaaaaaaaaaaaagacaatgtttacacaaaactttctgtaaatctttacatgatgacttggcatggtgggtggctcatgcctataactccagcaccttgggatcctgggggaagaggatcacttgaggccaggagtttgagaccaggcaggacaacacagcaagaccccatctccagaaaaaataattagccacatgtggtggcacacgcctgtagtcctggctagtcaggaggctaaggtgggaggatcccttgagcccagcagtttgaggttgcaatgagctatgagcatgctactgcactctagcctgggcaacagagcaagaccctgtctctaaaaaataataataaatagataaacaaatctttagataattttgttgggataactgaaggctataagagatacatatttgaaggactattttagacgagattgggcgcgttcagggtggtatggctgtagacttgaaggactattttaatacaaagcaagttcttaaccgaaaactggaaaaacattacttccttcttcctcctacgcttcttggcaggaagtacactgtacaattttaaatttaaaggttctggccgggtggggtggctcacacttgtaatcccagcactttgggaggccaaggcaggcagatcacgaggtcaggagatcgagaccatcctggccaacatggtgaaaccccatctctactaaaaatacaaaaattagctgggtgtggtggtgggcgcctgtaatcccagctactcaggaggctgaggcaggagaatgccttgaacccgggaggcggaggttgcagtgagccgagatcacgccactgcactccagcctggtgacagagcaagactctctctcaaaattagttaattaataaatcaatttattaaataaatttattaattaataaatcaatgtattaaatcaatttattaaagcaatttatttacttatttaaaggctctgtcaggtattgcctaaggtaaaagtctgtattgtaagacagaaaacctctgcccaggacttcagtagctcagagagggaaaggcttgatatgtgtctgaaaagacaagttttagacagcaagaaaaaagagatccttcccatttcaactccttaccctcctctacccccaatgaaaacagaccttccttcgccttatccacaggctcctccaccaagccaaggccagactcctgcaatcataggatggcaacaccacctctaaagcacagaacttcaggctttgcttcggaagtggcaccatggtctcttcattttccctttcttcaaggtcagaaaactgaagctgttaggagttttagtgttaagttccttccgaggatgttaattaggcttcaaactgttttgttctgagaaataaaaactaaactccagtcattcaagctaacagttgaggtgttctatggcttcaaaatcaagtaagatttgtaaatgaattgctaggtgcaaccattacttattatatgccacacaaacagtggagaaaattatggacaccaccatccaagtgattgagattattaattttaggtagcaggccaattcagacatgtccacttatcctcaatggcagggggcctctcacatcccctccctgtaacccagttcaatacttctgtctaaagtctagaatttcaatgttgaaaggagagcgtggttagtgagagaaaatccacaaagtttatcctgatgatcctttctgaccatccattgaaaccaaagtagtaattcaccagttcttggcatcaggagctgtttcaggcaagggcctgatgtgcaactgccttatgtctgctgccaagaggaacctaaagtcacaagagacagacccacaaatatcacagcctgccagagattttattttggatacacctgagatttatcaataccaactgtgcaaagaaaagaaattgtttcagtcttcccattcagtagctccttcttgagaacatgacctgaagaatagataagatgaacccacccatcccccaccccaagttacccctgcttaaagaggaaatacacatacctctatacattttacaagcaactaaaacaactagaggttcatctgcatttataagcttctttgacaatgcaaatatctactgagtgttaattcttgaaatattttacacatttctgtgaatttcttacatcaccagttctttcttatgtctatttcattttgtaagtgtagaatatgattatattcatgaaactcaaatgatacaaatagtcaaatttattgtattagaaattaataagaatagtaaagttaattctttgttgatttgtttatgcaccttcctctgtcactggtttataagctccataagtgccagaggaaaacatatcttattcttttttcattcccagaacaaagcacagttcttggcatacaatacaggatagatgatctgttgattgagtgaatgaataaaacaatgagcaagtaaaaaatgaaattactttttcccactgaagagaaagagaaatgcttgttgggaaggagaaatgaagactattttttttttttttttgagacggagtctccctctgtcgcccaggctggagtgcagtggcacgatctcggctcactgcaagctccgcctcccgggttcacgccattctcctgcctcagcctccagagtagctgggactacaggtgcccccccaccactgccggctaattttttgtatttttagtagagatggggtttcaccgtgttagccaggatgatctccatctcctgacatcgggatccacccacctcagcctcccaaagtgctgggattacaggcgtgagccaccacgcctggcaatgaagactaatttttaaacgttgagtgctaccacggagaccagcctgtatcatgagtcacagtggagactttcggaacatctaggaaacttcagaagggctctgagcccctgggtggtacagacagttgtcaccttggataacgttgccacagttcttgctggcgaccatttcccttcatttcactgaaacaaaaacaaaaacaaaaaaccctcacagatgccttaggcctttccttgattttaaaacattattctcttttctgtatttataaaaaccaaaaaagacaggaactaggtgcatgtgctaaagtagaaaagaacacttaaggccaggagcagttgctcatgcctgtaatcccagcactttgggaggctgaggtgggcagactgcctgaggtcaggagttcgagaccagcctgaccaatatggtgaaaccctgtctctactaaaaatacaaaaactagcagggcgtggtggtgggtacctataatcccagctacttgggaggctgagacaggagaatctgggaggcggagattgcagtgagcagagaccgggccattgcactctagcctggggaacaagagtgaaactccacctcaaaaaaacaaaaaataaaaggacccttaaactagataacagtgggggtcaagtagtaacccaaggctctgagttcagtaagtaaataaatctaatatgaatgccctctcctctcactcatctattaacttgtagaacatttccttcattactgcatcagcgatgagctttatgctgtgaaattctcaaaatctaaagcttatgaagtggtctcaaggtccaaagcacactaaaaactcattacttacaaaatgataccaagtaactgtttcatcatctttaccgtacctttaccatatttgagtggctatgtgaaatggtcacaggttagaaacacatcatagtccaaaagttgaagaatattccacaggtaatcatttcagtcacaggaagtggaaccaggattgaagagggtgttgaataagctacaaaagtgggtatagtatacctggagtcattactaagcagagttctcagatttgatcaaggttaattcaatgagaaatggaatatatatagacaataggcaacaagattagcaggaagcagtcagatcaagtagccaatcaggaattgaaatcggtccttgaaaatggaaaggtgattgaattgaggcatacaatgagatatccttctgtggctctgggaaagtaaaattggttggcatgttaacatggaataggatttctacaaggccgcttaaagaatgtttccatcctctgagaactgaagggagttccaaataggcagtttgtgactgatgatgagcatgttgatgataaagtctcctttatataacagccggcagacgacttggtcacacccacacatcttaaattcacataaaggtaaatatatggtcaggcgtggtggcccacacctgtagtctcagcactttgggaggcgaaggcgggggtggatcatttgaggtcaggagttcaagaccagtctggccaacatggtgaaactccatctctactaaaatacaaaaattagccaggcatggtggtgcatgcctgtggtcccagctactcaggaggccgaggcaggagaatcacgtgaacccgggaggcggaggttgcagtgagccaagatcgcaccactgccctccagcctaggcaacagagactccgtctcaaaaacaagtcaatatagctgggcatggtggcttgtacctagctacttaagaggctgaggcaggaggattgcttgaggtcaggatttagagaccagcctgggcaacacagggatactctgtctctaaaaaaattttaagaagtaccaccaccatgcccagctaattttttttgtatttttaatagagacggggtctcaccatgttagccaggctggtctcaaactcctcacctcaggtgatccacccgcttcagcctcccaaagtgctgggattacaggcatgagccacagtgcccagccgagaacttgcatttctaacaattcccagattgtgctgtttggggaaccatactttgagaaacacttccctataacctgataggttatttcccctaagatccagatgagtaaaaattaatacacattagatgaaattccagaagttatcttcgaactctgctactcattgaatgtcatgaagatattggaaaaaaaagaaaaaaacaaaaaacaaccttgctactcaacgagggatttgctattatcacgtttcagagaaattcagaacctcaggcctaaacgcaggcctactaaattaggaactgcagtttctcacaatcttcaggtgatttctatggtcattaaagtttgaaaagctgccttgaaacagtccttcctaaaactgaagtggaggtgccgcaaaaatcatctggtaaattgtttaaagtaatcccaaatgcaactcaaatctacagaatcccaggtgaagctcagtaatctgtatttttatccttctccccaaataattctgatgtgcaggcaagtttgaaaaccactgctttaaagaaaatggatactccccttaccaagcagaaagtaggattttggaaactgatgcaagggaagcaaaaagatgcctcaggaggcacgattacaacaggattgatgcaaacggaagctgaagcttaaccaaagacattaatatacgcccacaaaagaaaatgctaaggaagtcaagtggtctgcatgaattctgaagaaaaatggagaaccaaagaacaaaatttgtcaatgaatttccagcacagtctaggttaagggagtgaatttcttgactgaatggcacagactctgtaccacctgattggctgttaccttaatggaggaattatattacaatgtataggtactttaattagaatgacctggcagttactgaggcaaaattttccgctcctttgtattctgtaatacaagaaggatctacatggatgttctgttctctgaactgtctggatgaaccggtcaatggcactcatcataccttagtttttaaatctgcattgtggtcataatctgttatttaattaatttctcgtatttttaataaaaacgttgcctatatattttagacagaaattgccttactttgctgaaatgctgagaaatcctagacagttttcaaggcttggctcaaatgtcacctctactaccctttgctgtgcctcctggcactgtgcttctgacactttgtacggtcctccatgacagcgtgagcacaattatattacaggcaattactcatgcccccctggctcaactgtggactcctttagagcacagatcatgttttatttattgtagcaactaaaacaattatttattcaaccaatgacacccataaacaaaactacctgcagagggcagagatgcaggggtaaagtcatgccaagattaaaccccagaaaccactgtagatttttcagagttgactcctacgttttcagacttctagacttcaaaaaacaactctctataaaatgtatgtttctagaaggaagaagtgtaacattgtcccccattttttttttttttgagctggagtcttgctctgtcgaccaggctggagtgcagtggtgcaatcttggctccctgcaacctccacctcccaggttcaagccactcgcctgcctcacttcaagtagctgggattacaggagcccaccaccacacccggctaatttttatatttttagtagagacggggtctcaccatgttggccaggctggtctcaaatacctgacctcaagtgatccacgtgcctaggcctcccaaagtgctgggattacaggcgtgagccaccatgcctggcctatagagtgctttctatttgccagacattgtgctaagcactttaaaatgcattatttcattttatcctcagatcagctccataaaataactacattacctctacatgtatatagatatatgtatctatatatacgtatatctacatacattgaaagtctcaccagtgttttaacttttgctttcaaccactatacatattttaaagagcttaagaggagaaacaaccgtttgcgtttttaaattttcccagataccatttctgctgctctttatctctgaagttctagtattaccactggcataattttcctttggcctaaagaccttcttttacttttattttagagcagaacttccgccaacacattctcttagattttcttcatccaaaatgtctttcttctttttctttttgccttaattgttaaagggtatttttgctggatatagaattctggattgacatttctctcagtactttaaagatgttctgtagttacttgaatcgctgaaaggcttaaagttggggactggctctatcacatatacgttttatagaaaggttcattactttcatatcttcattgtggaccatagcctttatcatcacaaaattttgtctcatttatgagtttttaaattttgctttgaacctaaacttttataactcctttctatttcctacaatgtggagtttatcgcggacagcacaggcagttggaaatatatatctggagtttagcaaagaggtctaggtaggaaaatggatctacaagtcattgatattttggccgggcgtggtggctcatgcctgtaatccctgcactttgggaggttgaggcaggctgatcacaaggtcaagagattgaaaccatcctggccaacatggtgaaaccccgtctctactaaaaatacaaaaattagctgggtgtgttggcacacacctgtagtcccagctactcgggaggctgagggaggagaatcacttggactcaggaggcagaggttgcagtgagccaagatcatgccactgcactccagcctggtgacagagtgagactctgtctcaaaaaagtcatcgatattttggtggtaattgagtcaactgttaattagggtaaagttggggaaactaaatgctgaggactatcacgtgtaagagggatgtttgaaggaggaataactggtcaaggaaatcgggtcataagtggcaacaggaaatttaagaaggatgtagtagtcaaaggtatcatacatgcattgtatatgtatgtagatatatatctttcaatgtatgtagatatacgtctacatacatacacaatgtatgcatgtagatatacattgaaagtatagatacatatctatctacatacattgaaagtgtatatagatatatacacacatacacacacacacatacatacaattataagggggggctagaataaagaaacctatatgtttgcaatacttttacattttatttagaggtaaaatgctaactctaagtaggcaggttaggtatatattttgtaattcctacagcaaaaacatagcacagatataaccaaaagccaattaataaaacataacactaaaaaatattcagttaatccaaaaataggcagaaaaaagaaacagaagaaaccccccaaaaaagaaataatcagaaaacaaataataaaaaggaaacctaaatccaatcattatcaatcatattaaatgtaaatggtccaaaacacattaattaaaagacgctgtcagattacatttaaaagaaaaacgaaaaaacaagaaaccatttgaaaatataatgatatggccaagtatggtggctcatgcctataatcccagcgttttgggaggctgaggtgggcaggtggcttgagcccaggaattcaagaccagcctgggcaacatggcgaaaccccatctctatttttacaaattaaaaaataaatgaatatcatgatatctagattaaaagcaaaagggtagagaaagatgtcattttaacactagtcaaaaacagtattatactactaatatagaacactaattttatattaatattaaataatttttttttcccccgagatggagtcttgctctgttacccaggctagagtgcaatggcatgatcttggcttactgcaacctctgcctcccggcttcaagcaattctctggcctcagcctcccaagtacttgggattacaggcagctgccaccgtgcctggctaacttttgtatttttagtagagacggggtttcaccatcttagccaggctggtctcgaactcccgacctcaggtgattcacctgcctcagccttccaaagtgctgggtttacaggcatgagccactgcacctggcctgtttgggtttttttttttttttcttttgagatggagtcttgctccgcttcccaggctggggtgcagtggcgtgatctcggctcactgcaatatccaactcctggattcaagtgattatcttgcctcaaccttctgagtagctgggactacagacgtgtgccaccacactaggctatttttctctttttagtagagatggggtttcgccatgttgtccggtctggactcgaactcctgacctcaggtgatccacccgcctcggcctcccaaagtgctgggattacaggcatgagccaccatgcctggccaaataatggtttttaatataattattattaccagaaataaaggttatttcagaatgacaaaggggtcaaataatcgaggacaaaactgtaaatgtttctgcatctaataacagtgcctcaaaatacaggaagcataaacagacagaatttcaaggagaaagagaacaaacccataacaatagttgcagacttcaacactcctttctcagtaatcactagaacaagcagacaggaaatcagcaaggatagggaagaccttaacacgatcaaccaacttgacctaattattatttatgaaacactttacctaacggcagcagaacacatctttcctattacaaactgaacattgacctaaacaaacaatgtttcaggccatatacaaacctctacattttttttaattcatcataatgagtatgttccctaaccataatggaattaaattagaaaccaacaacaaagatgtctgggaaatccctaaatgtttgaaaattaaacaatacgttttaaaacaaatcatgggtcaaagagtaagtcatagtagaaattttacaatattgtgaaccaaatgaaaatgaaaataaaacatgtatcacaaattctaagatttgtttttaaaagtgcacaaaggggctgggtgcactggctcatgcctgtagtcccatcactttgggaggccaaggcagatgaatcacccgaggtcaggagttcgagaccagcctggccaacatggtgaaacctcatctctactaaaaatacaaaaattagctgggcgtggtggtgggcgcctgtaatcccagctacttgggaggctgaggcacgagaataatttcaacctgggaggtggaggcttcagtgagccaagatcgcaccactgcactccagcctgggcaacagagcaagattttgtctttaaaaacaaaaacaaaaaaatgcataaaggagcacagtggtttagcctggaatcccagcactttgggaggccaaggcaggaggattgcttgagcaaaaaaattcaagaccagcctgggcagtatagtgagaactcatctctatttaaaaagaaagaaagaaaaatcaaagaaaatgaggtatatatgcacaagaggatattattcagccatttaaaaagtgaagtcatctataaagcttaaggtttggaaaataaaatctgtttgcagcaacatggatagaactggaggacattatgttaagtgaaataggccaagggcagaaagacaagtatcacatattctcattcatatacgagagactaagaagttgatttcatggagataggcagtagaatgatggttaccgggggctgggaagcaggtagggatgaagacaagttgattcatgggcataaaaattcagtcagatagaaggaatacgttttagtttttgtttgcacagtagggtgactagagtcaacaataacttagtgtatattttaaaatagctagaacatttgttatcttcccaatacaaaaaaaaaggataaacatctgagatgatggataccctaattaacctgatttgatcattacacactgtatgaatctatcaaaatattacatgtacccttataaatatgtacactctaccttaaggaaacagtgaaaaaagaaggtgtggaacaacgaccacaacaaaatcaaagaggaaactctttgtgaacttgggtttgtcaggccaggaatcagcaaaccatggccaatccactacctgtttttgtaataatcaaaacaatataattgataatttgtaaattatgtgaaattcaaactgcagtgttcataaagttttattggaacagctattattcatttacatattgtctatggctgctttcattgctacaatggcagagctgcaacagggacagcaaggctgaaatatttactatctgaccttttacagaaaaagtctggcaaggtctgggttaggtaaagttgttagatgaacaccaaatgtgtaaaagaaaaaatgtggtaaatcagacttcatcaaaatttaaaacttatgctctgggaaaaagacaccgctaagacaatgaacaacaaggcacagatggggagaaaatgtatgaacatcacacagcctaacaaagcacttatatccaaaatatataaagaactcttactacccaatagtaagaaattggccaggcatggtggctcatgcctgtaatcccagcactttgggaggccaaggtaggcagattgcttgagctcaggagttcaagaccagcctgggcaacatagcgaaaccccatctctattaaaaatacaaaaattagccacacatggtggcatgcatctgtggtcctaactacttcggaggctgaggtggtgggaggatcaccttgaacctggggtcggggggaatgacaggctgcagtgagccaagatcatgccactgcactccagcgtgggtgaaagaaggagactctgtctaaaaaaataaaagaggcctggcgtggtggctcacgcctgtaatccagcactttgggaggccgaggcaggaggatcacgaggtcaggagatcaagaccatcctggctaacatggtgaaaccccgtctctactaaaaatacaaaaaattagctgggcgtggtggcgggtgcctgtagtcccagctacttgggaggctgaggcaggagaatggtgtgaacccgggagggggagcttgcagtgagccaagatcgcgccactgcactccagcctggcgacacagcgagactccgtctcaaataaataaataaattaattaattaaataaaagaagaataacaataaagaaagcaacccaattaaacatcttaaataaagattttggtatcttggccaggcatggtggctcatgcctgtaatctcagcactttgggaggccgaggcaggcagatcgcttgagcccaggattcgaaatcagtctgggcaacatatcaaaaccccatctctattaaaaaaaaaaaaactagccaggtgtggtggtgcgcacttgcaatcccagttacttgggaggccgagaggtgggaggatggcttgaacccagaaggtggcggctgcagtgagtggtgactgtgccactgctctccagcctgggcaacagagcaagactctgtctcaaaaaaaaaaaaaaaagattttagtatttttccataaacaatgatatacagatggcaaatcaaaagatgcacataaaaagaggctcagaaccattagtcattagggacaaggaaattaaaaccagaagaagctaccaccatatacttattaaggtggcaaaaaaaaaaaaaaaaaaacttgaggccgggcgcggtggctcacgtctgtaatcccagcactttggaaggccgaggcgggcggatcacgaggtcagcatatcgagaccatcctcgctaacatggtgaaaccccgtctctactaaatatacaaaaaaattagccgggcgtggtggcgggcacctgtagtcccagctacacaggaggctgaggcaggagaatggcgtgaacccgggaggcggagcttgcagtgagccgagatcgcgctccagcctgggtgacagagccagactccatctcaaaaaaacaaaaacaaaaacaaaaacaaaacctgacaatatcaagtgctagggaggatacagggcaaccggaactcttcatacatttgcaggtaagaatgcaaaatggtacagctactttggaaaacagttttggcagtttcttataaacatacaacccagaaatcatactcctaggtatttactcaagagaaacaagaattgtgttcagacaaaaaacattatggaaatgtttacggcagctttattcatagctgccacaaactagaaataattgaaatattcaactattgaacagataaatgcactgtgatacactcatataagggactgctactcagcaataaaaaaactactgatacaacaacatagatgaatcttaaatacattatgcactgtacacgtataaactaaaaaattaaaatacctttttaaaagtcaaacaggccgggcgcgatggctcacacctgtaatcccggcactatgggaggccgaggctggcggattacctgaggtcaggagttcaagaccagcctggccaacatggtgaaaccctgtctctactaaaaataccaaaaattagccaggcgtagtggcgggcgcctgtaatcccagccactcaggaggctgagacaggagaatcgcttgaacctgggaagcggaggttgtggtgagctgagatcgcgccactgcactccaccctgggcaacaagagcgaaactctgtctcaaaactaaataaataaagtcaaacagtacatgaaaaaataatatgattaagagaggttcactgcaagaatgtaagggtgaatcaatataacatctagtaatataattctatgaatatacactactgtaattaatatgtagcatgcaggacgaaaactatatgatcatctcaaaagatgctcaggtgtcatttaacaaaatataatagccatatctgatttaaaaaaaaaaaacttaaacagaaaaaaaattgaaataggtgaatatactcaacacactaaaggtctcaaaccaacagttaaccattaaatatctgcatcagttccattaaattgggatagcatactaagatgcctatcattataactaacatttgacattgttttggaggaggtggtagggaatgcaatttttttcttttttctttattacccaggttcccatcaatggtaaaggcaatgtaatttgaagagaaaaaggagatataaatataagaaaatcagatgtgtacatgattcatgtttgcagatgacacaactttattcctagaataaagttattccaatcaaagcaaaagctacaagaaacaattagaaaaaagaataggtggctgaattcaaaattaattttttaaattaatgagttttcaactagaagtcccctagcagagcaggtattttcatagacaaattaaagattaaataagatatcatggcataagtgaaaatatttagcaaataaattatacttcatccaattttgtaaaaagtacgtacatatacatgtgccaggtgcggtggctcacgcctataatcccaacactttgggaagctgaggcgggcgaatcacctgagctcaggagttcgacaccagcctgggcaacacggtgaaactccatctctattaaaaaatacaaaaaattagctgggtgtggcagcgagcacctgtagtcccagctactcaggaggctgaggcaggagaatcgcttgaacctgggaggtggaggttgcagtgagccgagatcgcgccactgcactccagcctgggtggcagaagagaaaaaaagaaaaagtatgtacttttttgctcaaaagaaaaaaaaaaaggtatgtatgtatgtacacatgtccacccaaagatggttaactaatgagaggaaccaaaatattaatgttctgggttttctaaattttctacattactttcctgataaagggaaaaagcaaaaataaaatgtaaaggtttttttttttttttttttgagatgaagtctcactctgtcacccaggctgaagtgcagtggcacgatatcggctcactgcaacctccgcctcctgagtttaagcgattctcctgcctcagcctcccaagtagctgggactacaggcacctaccaccacgcccggctaattttttgtatttttagtagagacggggtttcaccatgttggccaggctggtctcgaactctcgagctcaggcaatccacccgccttggcctcccaaagtgctgggattacaggtgtgagccaccacgcctggccaaaatttaaaggttttactagatttccagaagcattatttatgaaagtcaaagcttttttcctaaactaattatcgaaatcacagactaaagaatgtcaagagctcaaaaatggggtgaacaaactatggccggccacagcctgtttttggaaataaagttttactggaacacagccacactcatttgtttacttattgtctatggctgctttcatcctacaagggccgagctgagcagctgtgacatagccaggtggcctgcaaaacctaaaatatttactaattggtgccctaagaacaagtttgccaatcccctgaccattagatcatctagtccatcctatactgtacaggtgagtaaactgaggtccacacaagaatgacttctctatggtccaaactcaagttaagtaagaagcaaggaagactccatttccatggtactttccaccacttggccaggaaactctcaaaacagacatcctgctgtttgggaggtaaacctcagggtctcatatcacatcgcaagtgagtgtatttgccaatatattgatgagaagaggactttgggcctagtcagtatccaagaacaactgctaaaggtctgagtaaaccttagtagactagaaaaagttaatttaaaaaccacacaggccaggcgcagtggctcacgcctgtaatcccagcactttgggaggcccaggcgggcggattgcctgaggtcaggagtttgagaccagtctggccaacatggtgaaaccctgtctctactaaaaatacaaaaaaataagccgggtatggtggcatgtgactgtaatcccagctacctgaaaggctgaggcaggagaactgcttgaaccagggaggtggaggttgcagtgagccgagatcacaccactgtattcccgcctgggtgacagagggagactccatctcaaaaaacaaacaaacaaacaaaaaacaaacaagcaaacaaaacacataagcacagactagggaaggtttaaaaacaaacagatgctgagagtataatctggttcagtcttttaaatagcacacactgtaacccaacaatccaatcccactcctaggaacctaccctacagaaacaccagcttaagtgactaaagatacatctctagcatatttaagacagcactgtctgtaaaagcaaaaagggcctgaattctaggcaaataaatattatcagcaaatgcagttatgtgttaataaagaagggggcacttcatgcctttaccttacagagggtcctgaccttctgcgcatgtaaatttgtgacccttgccataaacaatttccactgttaggtttcttccgagacagagaagattcacaactcatgccattaaggcagttaaggacaaccaatatacctggaagacggtaatcttccaagttacagaggatcagaaatccaatgcatttcacctggataattcagactcaaaagttcaaatatttatctgaaattacagtaaagccactttaaaactttttattctttgtgcagcactttgaaagcacagtacagtcataaggtggagaaatgagtaacttactgaatgagactttcagaagtgtgtgaaatagttttcatgtctacaaaaacagggaaaactgcactttctttctagttgttctcttgattactgtgagaagagtgttgaagtctacaatattgttaaggatgtgtctgtttctccttggagttctatgagtcctcatgtattttgaggctctgttattaagttcataaacctttaggaaggattgtttttggatgggctaagatattattcgctattttaaatgttggaccatctcttgagacaaatatccaagcaagaattagagaggaaaaaggataagagaaattccacacagattaatatatgcatttctgaaatactttttaacttccataaatagaatatacacacagacctcaaaagaggcactatgaacatagtgaaattgagcaagaagccattatttctagtaaatcatataaactgcacctactgaatgttgccatttggtatgaatcacatggccaagccgtttcccaagtgtgggaattacagaacatatccatgagtagagaggagtctaagcataactttcttagcaaatctcaggggggttccacagacaaataatttggccagtgactcctgcgtaagaggttttatataggagaacccagacacactacgacatactaacatctcacaattcagtttgcatatcaatatttacacttttataacactgaaattctctgagttatcaaatttaatttctcaaccaaaagtctctgaatcctaatccttccttcccttctggcctacatatatgactcttagcttacttttaccaggactgtggcagattttctaactatgtgttaactgactgcctcttcaccctaccaccaagaacaacaaataatggaaagtcatctcacacatgaccccaaatcttattgcagaaatgcaataccatcacatacacaaataatgctgggcccagagtctccacaaaggaggacctcactcagccagaccgctggggctacccaagctgtgcaggatttagggcaaataaaaggctagaaaaggagatgttaggtaaattctcactggtctaacagaggcagactgactacagtgagtccaggagaactttctgtaatgatatgaaatgccccaaatgctctacctttgtgtggtgcaatacacgtggctacagagcacttgaaatgaatgtataacagctagtgccactggagaaactgaagttttcattttacttaattttttttttaagagatgggttctcactctgtcacccagtctggagtgtggtggcacagtccatagctgactagagcctcaaactcctgggctcaagcaatcctcccacctcagcctcccaagcaggtagaactacaggcatgccatcctatgcccaactattttaattcttttgtgaagacagggtttttacaaaaccctgttgctcaggctggtctttaactgatgcctcaagtgatttcccacctcagcctcccaaagtattgagactacaggtgtgagccaccacacctggcctacttagttttaattaatttaactctccacatgtggctagtagctaccatactggacagtacagaggatgaaaacaacccacaggctttatttgactcaacattcagttccacaattacctgtgctgcctactgcattcaagagatttaaccaggcactccagagactgaatgggactttccctgcccaaagtaggttgtaatgaaggaagggccagatcattaaaaggccatttcagttccacctcttaacagatatagatatagataaaggggttaaataattaagaggataaaacaatccttcctaaaggtttatggactttaggaaggagcctcaaaatacatagatgcagagcctcaaaatacgtgaagattgctagaacttcaaggagaaacagacaaatccttcacaatagctgtagacttcaacacttccctcagtaatcaacaaaacaagtagaaagtcagacagatcttaataacactatcaacaaacttgacgtaattgatatttatgcaatactccacccgacaagagcagaatacaaaattcttttcaagtacatatggaatattcacttagactgacaaaattttggggtgcaaaacctctaaaaatgttttacaaaattaaagtcatacaaagtatgctctctgaacaaaatgaaattaaattagaaaccagtaactgaaagatacctaaaaaaaaaaatccccaaatatttggctaaaacaattaatgcacgaggtcctggaggttaagggggtgggaaacaaaggaactcagccccaactgggggtaaagggaatggtgatcagagaaggcaggctggagagggtgatggatgggtgactaggaggtgggtctgtgagaactacgaagaaataagtattactagatcaatttgagatgaagagaagaaataaggagtgaacaaggaaaagagaaataagggggatgtaaaaagtaaagtagaggttcctcttcaagactttcctctctaattaagaataaatagtaacttctcttagaagcaaaatttattcaaagacctgtgctaacattcttaaatatctgctagccataataaagaaatcaatgtactttatgttcttagctcccacaatttagcctaaatatttgccctggcacgcttaggctggtccaagcaagcattaggtcatagcctgttcctcttccttatttaaaagtgtttttacctttctcaacattccacaagttacttcctccttcctttgttcccctctacctttgcctcttttaaaaagttctaagttactaaccaatcgggacaaatacagaatgtgaggtcccgttccagccaaaggaaaccggaaacagcagtaaggtagatgcgtcaggttataaatgaccctatctcctttgttgggtgtactctcatggcaaaactgcccgtgagtgtaccctttctgcaggaagtaaaaatggccttactaagtaaactaaatttatgttcaagtgctgtttcttcacggcaccggggaacaagcatttcaaacaggagatttagaagtcagttcatccttgactcctttcctcccgctcaccacatcccagcctaaccaatctatctcattcaggattcattctaatgcctgaattattttctgccaggtgctgtggctcacacctgtaatcccagcactttgggaggccaaggcgggtggatcacttgaggtcagaagttcaagaccagcctggccacttgaaccgaggaagaggttgcagtgagccaaggtcatgccactgtactccagcctgggcgacagagtgagactctgtgtcaaaaaaaaaaagaaaagaaaagaaattaaaattgaatttgcaataatccagcaaataatcctatttatatacctaagagaaatgaaaatatatgtatagataaaaacatgtacacgaatgtgctcagcagcattattcataatagccaaaaagtggaaacagttcaaatgtccatgaacttacgaaatggataagcaaaacatggtctctgggcacagaggtgtgtgcctgtaactctagctactctggaggctggaaggctgaggcaggaagcctgagcccaggagtttcaggtcagcctgggcaacattgcaagaccctgtctccatttaaaaaaaaaaaagtggtacagccatacaatgaagtgttattcaaatatagtactgatacatgctaagatatgcataaaccttaaaaacagtaggctaaatgacagaagccatacattatatgattccacttaataagaaatgtccgtaagaggcaaatcaacagcaaatgaacgtaattactggctgccaggggagagcaggagggaggtgaagaacagggagtgacgccataggcatgggcttcttttgcaggggcgtaaaaacaagctggaattaggtagtgttaatggttgcacaactctgtcaatacactaaaaaaaaccactaaattgcatactttacaagggtacattttacagtatgtaaattatatctccataaagctgttaccttttaaaaactgaattttcataaatattgcttgaaaatcattctgcaatttaaaagatgttcaataaatgttaactattactgtcgctatttttaaaatgtgacactctcaaaataatatttgaatataactatcaagaaaaacataaaaattgtagatatataccagcagacaaaacaattgaaacattatatttacacgcattttaattctttctatatggtcactttcgatcttttaaagtgtattttaatgtataatttttttttaagttaagaaacatgctgcctcctgatgcttatgttaaagaaccaaaagcatgaaaaaaactagaggccgggtgtgttggctcaggcctgtaatcccagcactttgggaagccgaggcaggtggatcacgaggtcaggagttcaagaccagcctggccaacacagtaaaaccctgtctctattaaaaagtacaaacattagccgggtgtggtggtgggcgcctgtagtcccagccactcagaaggctgaggcaggagaatagcttgaacccaggaggtggaggttgcagtgagctgagattgtgtcactgcactctagcctgggcgacagagtgagactccatctcaaaagaaaaaaaaaatagaataattagtgtcagtgttaagctagtgctgagatcataaccactgtcaacaggcactcaaagagaaggaagaacaaggtgcgcaacaggactcaaggaagatctcccaggaagagggattcgagcctggctaaggagcaggaagggaaaagggcatcagctaggatttgttcctgtgtcacccagattaccacttgctcaccatgactaccactctctcacccccatgtctccatcattaagggtctttagtcaaagggaagacacagggtcttgaggactgaggaaaggaggacctaacagaagagaccagagctcctggtcttaacatccccagtcctgttatatgcatgtttcaacacaaacttccaaacatgcccatgggtgagcagaattgaacagcacgaactgtatgcaagactatttatcactgcgtaactaggacatgcctctccactactcacaaatcatgttgcccaactttttcaaaacccttttggctctcactttaattatcatgtttaatctcttgaggtactgatacctgaaaacagatgtcattaatttcccttataatcttgacctccctattgttactgaaagtactaccattcttagggaggtgtaggtgatgcattcctctctctacattctatgtgtcaaggccagaagaactctagagtacctcctggactgatcttccatttaggactacaaaacccaccagctatcttgtccttgtcaatccatcctgcagaacagaagctatgcttcaagatcttctgatcatcccaatacccaaaattaaacagattcgaaacagatttgagagagagggctacaccagtggttcaacagcatctctgtaatttgatgtggttctgtttcatgtttatgcatggtgctgctgggaatacagcatatcttctcggggtgtcaggagtgaaaaaggcctgaggatcacgatccagcccaatccctattctacagaagagggggaaagtacagttgctatagcctgatcctctaagtactgcccaacacaacatacaagggagttttgattaatttcctattcacacactcaggctcttgttacaccgagttacttgagactgcccacactttactatcagtgcctgccgctccctcccgctctctccccctccctccctcaatctgcctgtccttactctccacatgcccatccaggaagcctacacccacaccaatccccttaaacagggtatataatctcaccctcctttaaatgcccactgcactttgtacctcacttgtaacgatcagaaattatactgaaaagatattaagttgacactggtgggaataatattgtcaaaccagtgacaaattctgtttgaggtaaatctatggttcattgatggcatctctgccactgatctccactgtcacaatccttagaggacataaatcactaactgtcccaggataacaccagggcttttgttttatgaagtcatcagaggttccaagttttaaaattccaggtaagtattctcagaagtctcacataagactgagactgaaacacaagaaccattctgttttacatacaatttcttaaaattagcaaatgcttaatttcaaagtgctgtcagaactttaccaaatgcctattgaaaacacttcctatataatccttctcattatatcggcaatgtcataaaatctataggctgaagtaattctaaatttaaaaagtaaaaataaattaaagcattattcagccatatgctttcggctaaagcaaaactaggtggttgcaattttatactaaaaagttgtcatccttacattttttccataaaaggaaaacaatcttcaataaataaacctttcatgactttagtaatatcaattaatgcctctgcattgttatataacctacaaaatactgagttatttcttatattaggagttatttcttatgttaggaatgtcacatgtcagtaattaagccaacgctgtaaactataaaaattaatcaaattactctaaattaccaataaagtaaattcctctttcagcctttgcagtacaacaggattcaaattcatcaatcatacttctttgtgtgttattcagatatcttaaaccagttctaaaatttttttcttccatctacacatttacctgacagccttccacccaggaagtacagactataaaaccaatgaaactagtacttagcctaaacaactcactgtcacgcgttgttactcattcgaggcaagtgggcatgttctaaaagtttggaactcaaaatgtcactcacatccggggggtggggggcgaggggagggaacttaaagagtgggtcaataggtgcagcaatccaccatggcacacgtatacctatgcaacaaacctgcacgttctgcacatgtactccattttgtttttagaagaaataaggaaaaaaaaaagtcacatccattttaccataatcttaagaaataatgctttgcaaaaggtaaaacatccaaattaacatcacagccaataaaggaaaacgcctggcaagcaatatgaaatagcaactcaaaaacaaagtaactcttgcaatgaaaaacattcactgggccaggccaggtggctcatgcctgtaatcctagcactttgggaggctgaggcgggcggattgcctgagttcaggagttcaagaacagtgtgggcaacatggtgaaaccccatctctactaaaatacaaaaaattagctgggtgtggcagcgtgcacctgtagtcccaactactcaggaggctgaggcaggagaattgcttgaacccgggaggtggaggttgtggtgagccaagatcgtgcgtgccattgcactcctccctgggcaacagagcgagacattcactgatcaaattgtccatcaaaatccaattagaaaagaacaacaacaacaaaaaaccaattaggacaatttttagtttcctaaatccaaaatatttaggggttatgacacccactgtagaattatcgaaacttcatgtactacaagttctcatctactaacaataatttatccaaccaatctttgatgagcacttgctatgtgcaaaacacttacaggagctgcagagggaatacgctcaatacctatctctacagagttaataatttcatataaggataggacaagtagacacacagtaggctacaggtgtcattaagaaaaacaaaatctcaggccaggcatggtggctcacgcttgtaggcccagcaccttggtaggctgaggcagacggatcgcctgaggtcgggagtttgagaccagcctgaccaacgtggagaaaccccgtctctactaaaaatacaaaattagccaggcgtggtggtgcatgcctgtaatctcagctacttgggaggctgaggcaggagaattgcttgaacttgggaggcagaggttgcattgagccaagatcgagattctaccattgcactccagcctgggcaccaaaagcaaaactccttctcaaaaaaagaaaaacaaaatgtcacaaaagtatcaaaagtaaacacatttttttaaagaacacctagctacaaattgtaatttaagtcagcatatgcacagccatcaatcctaaatattatttgctaggccttcaaatacgacttaaagttagctgaactgccctgccaaaatgtctcagctctgtctaaccagaaaaaacttcctccaggggtgtatgcaatccagtctccatgtttcaattaccggctctgggtacaaagaccaacatgtgatttcttaaggtaaaaattattactataaaagatgtactagcccaggcacggtggctcacgcctttagtcccagcactttgggaagctgaggtgggcggatcatgaggtcaggagttcgagaccagcctggccaacatggtgaaaccccatctctactaaaaatacaaacattagccaggcgtgctggtgggcgcctgtaatcccagctgctggggagcctgaggcaggagaatcacttgagtccgggaggtgaaggttgcagtgagccaagattgcgccattgcactccagcctaggcgacagagcaagactcctttaaaaaaaaaaaaaaaagcactaaaattaagttggcaagaatttacatgtactcctttttacatataagacataaatatctgacatttgattcattcccttcattctccagccagcctcccagggcaagtctggcgaggattctgaccatcgggcaaaagaaattaccttttttcagtttatgttaggacaacctacgtgggtttacatttggcttaatataatactaccctacttctccaataagtatttaagcatttattaaaaaacagaaacttttcaatttaaccacttctactaccctagtctctctgagaaagacaggacacacctcacttcaaggaaaaaagggtcctttttcctcacaaatacttcctcataaactttattttaaaaatgattttaaaaccagattctaatttaattaatttagatttgcaaaattataaaggacaagtcttgccggttgttgcttcggttatgttaatttcacaatttagtacactgcaactacgtatttaatacaaagcagcctttgggcggggcggggcggggcggggcggttaacaaaatgcatctcagcaccagcctagagaaacttttctgtgtgtaaacagaagaggggttaccatggagaaattcattacggatttcgggagggctttttcctcagaaatagagtgaaaagaataagtcgttgtgtaataaatctgatactgacgctgtgtgacttagaagttggtccaaaagttcatcttaggcacttatgcctagatgatcaactacacatcttctgcaacaggtgacacgaacctgcatttcccaagcaaggcaaagcgatcaaatgagttaagacgcgtgttcctgcggtcttgtaaatttttgatttaaccaaaacaattttgaatcagatgaattaccaaatttcgttgggtcttgtttggctttctgctttgctttttaatcagccatttaccagaaactgttgcacgggcccgttagcactcgaagaataaaaacaaacacacaagaccagataaggttcccctactaacccaaatgatccgtttccttaacataattttaaaaccacagctaggggtgtgaaaacagattgtggcacacaatctgtccaaatccttaattcccttttaaggaacagatatataataaaaatccgaaaggaaccacattagaaatgaaaagaggtttgcaaaacaagaggcttctttcattccagaaaactaccaaaacaaggggaaaaaatgaaagcaatggatatgtgtttgcccaagtttcaatcttgcccggtggagacactacactggtacaaattctgaggaggaaaaagaggaggttggcgggaggcgggaagagagagcgagtgtggcccgccaactgcaacaatgcaatctccattttgaacaatgcgcctctttcctcctataaatctggttttttgccacttgatgtgccctcgcatttcccctctgggggtcggcggggttggggggagatcggagcaggatgcacagcacacgagtgagcaaagggggagggcagagaaggtggggaaggagtctgcagcaactgggctgagtgggtacctggagtgctgctgtaggtactatggctcctgacgctgctttccgtgcagtaactggcgtcctcctacaccactttgttgacagccctccagaccgcagccgtccgggccaggtggctgcccccgcctccccccggccggggcgctggtgctggggtggggccggcggcggcggctttctccggctactgctgcccatcctgggcgagctcaggcgcgtcttgggcgccacctcagcctggcggcgacccacctgcccgggctgctaccgcgttgccgcgagcggaaccccggatgggtccggacgtgggcagcggcagcggcggcggggccggggcgcagcgctccgcagagggagccgcgggctgcttggtcggcctgccccgccggcccctcatgttggagccgaggcggagggagaagggaaagcggccgggaaggggcgggcgcaatgggcgcagtgggggcggctggggccgggtggggaggccagaggggcagggcaggaggggcccggcctgcggaagcggttggagggagaaggctcaatccgaatggctggggccccactgcggatcgccttcagcctccatctcgtttcttccgttaacggagcgcggtcacgtgagctgagcagcctacgagcctgggacggggcgaggtggcgcagcggctgcttgggggagcgcgggagcattgagtcgggggcagagagcctggggcgccggggctgggcgcagcgaggcgcggctggactccgggcttggtggcgcggttgagagagacgcgcagctggcgaaatgccccgcgtctaaggccttcggagaccatagtctccgcggacccctggctggagcccaaagccggtcggacctcctccctgcgtctccccttccgcggctcggagaggaaggcaggagagcccccaaatattcccctcccgccctctagggaaactgaagctgaaagaaccagcgaaagaaaaaaaagtctcggagtggggcggcccgagcgacctaagggacggggcagtggcagcgaccgagggaaattagtcggggtgggggaacagggagacaagcccccagaatttaggaaactcctaaattctactaaaaatacaaaaattacctgggcatggtggcgggtgcctgtaatcccagctacttgggaggctgaggcaggagaatcgcttgaacccgggaggcggaggttgcggtgagccaagatcctgccattgcactccagcctggagaacaagagtgaaactacgtctcaaaaaaaaagagaatagagagccatgcagtccacgcgggattgtgagctgtggtgtgagagggtgaagccagagaacaaggcggcgctggaggcgtgggtcaggcagacaggcatcgcctggtgcaggtgaacgggcagaggaagtatggcgggccacccccaggctgggtgggcagcccgccgccggctgggtcagaggtgttcatcgggcggctgcctcaggaagtgtatgagcaccagctatcctgctgttccagcgcgtgggccgcctctacgagttccgcctgatgatgaccttcagcggcctgaaccgcggcttcgcatatgcccgctgcagctcgcggcgcggcgcgcaggccgccatcgcccgctgcacaaccacccgctgcggccgtcctgcccgctgcttctgtgccgcagcaccgggaagtgtgagctgagcgttgactgcctgccgccgaatctgacccgcaccgcgctgcagcccgcgctgcagccgctgggtcccggcctgcaggaggcgcggctgctgcccagccccggaccggcgcccgggcagatcgctctgctcaaattcagctcgcactggaccgctgccatggccaaaaaggccctggaggaagggcagccacacctctgtggagagcaggtggctgtggagtggctcaagccagaactgaagcagcgacttcgccagcagcttgtgggtccctccttgtggtccccacagccagacggcagccagttggccttggcaagggacaagttagggtcccaaggggctcgggctaccctgcagttgctgtgccaacgaatgaagctgggcagctctgtgttcctcaccaagtgtttgggcataggacctgctggctggcaccgcttctggtaccaggtggtgattcctgggcatccggtgcccttcagcggcctcatctgggttgtgctgatcctagatggccgggatgggcatgaggtggccaaggatgctgtgtctgtacggctgctgcaggcactcattgagtctggggccaacctcctgtggtctgctggggctgaggcaggtagcatggttaaacagtgactccattctctctccacaggcagcccgaatgggcatgcacagcctgtgtcaggccccaacccagcagacctgggtggccactatctgacccccaaaggtggggaggggcatgggcccaggcccatcagcctccctgctgggacagggacctatggcacctgggggcagcttaggttttgcttaagttgtggtgatgggccttgccctccccctcccagcccagggtccaacctgacccagttatcttccctggccattccttgtcccacccccacccgatcataccttcccccctctgccacagcttagcatgaatcttctttattgtcctgatttgtcctgtttgttggtttttatttgtggggaagggcagctgagccaaaggggtcaggaattatgccctttgcctccaccacatggcattctggttttggtttctgtatagttttgggtctttctatgctggttgtatttatattaaacccctggttagtaaaaaaaaaaaaaaaaaaaaaaaaaaggccgggtgcggtggctcacgcctgtaatcccagcactttgggaggctgaggcgggtggatcacgaggtcaggagatcgagaccatcctggctaacatggtgaaacccggtctctactaaaaatacaaaaaaaaaaaaaaaaattagccaggcatggtggcaagcgcctgtagtctcagctacttgggaggctgaggcaggagaatggtgtgaacccaggaggcagagcttgcagtgagccaagattgcgcaactgcactccagcctgggtgaccgagtgagactctatctcaaaaaaaaaaaaaaaaacaagaataatagtctccaatcccgtccaggttgctgcaaatgccattaattcattcctttttatgactgagtagtattccactgtatatctataccacagtttctttagccactcattgatgggcatttgggttggttccacatttttacaattgtgaatagtgctactataaacatgtgtgtgcaagaatctttttcggccaggagcggtggctcactcctgtaatcccagcactttgggaggccaaggtgggtggatcacaaggtcaagagatcaagaccatcctggccaacatggtgaaaccccgtctctattaaaagtacagaaattagctgggcatagtggcacacgcctgtaatcccagctacttgggaggctgaggcaggagaatcacttgaacccgggaggcagaggttgcagtgagctgggatcgtgctgctgcactccagcctggcgacagagcgagactccatctcaaaaaaaaaaaaaaagaatctttttcatataatgacttagaaagactgaactcttacctgggctgtgtgtgttctctctcttttttagttcattcactctagctatgtggggaggacattcaggcagtgtgtggagaagtccaggtagtaagccaatgaagtcttcaaccaatattcagtgaggaactacagcctgccaacaaccaacgagtgaccttgaatgcatattttctcccaattgagtcttcagataagagtgcagccccaggccactgcttgactgaaacatcccaagagaactgagcagaaccacccagctaagtccctcccagattcctgacccacagaaagtgtgatataataaatgttttttgttttaagctgctaaatgttggggataattttttttttttgacatgggcctcactctgtcgcctaggctggagtgcagtggtatgatcatggctcattgcagcctcaacctccaaggctcaagggatcctcccatctcagcctcccaagtagctgggatcacaggtgtgtaccaccacacctgactttggtttttttttttaaagtagaaacaaagtcttgctttgttgtccaggctggtctggaactcctgggttcaagtaatcctccatcttcacgctcccaaagtgctggtattacaggcatgagccaccatgcctggcccaattgttaaatcttttttaaattttattatttttttcttttttgttcaaagtgttaatttttttttttttttttttttttttgagacagagtctaactctgttgcctgggctagagtgcagtggcacgatcttggctcactgcaacctccgcctcccaggtttagttcaagcaattctcctgcctcagcctcccgagtaactgggattacaaacacgtgccaccacacccagctaattttttgtatttttagtagagacagggttttgccatgttggccagtctggtcttgaactcctgacctcaggtgatccaccctcctcggcctcccaaagtgctgggattacaggtgtgagccaccatgcccagcctagtgttaaatctttataacaacataagtacgaggttgagacttattaccctgttttacagatgagtaactgaggcacagaaaggttgagttacttggccaaggttatacaactaataattacaggataccaaaaccgctagcttctgccagtgctcttaatataaggttgaaagaaaaaagaaaagagccaattaacataaaacatagctgttagaagcctccttctacaaatggcgatgaagtctaagttgataatcatagccgccttcttccaccacttcttccaatcccctttcgaagggttctgtgcctcatagggacactcaatactttattccataagacctgacttcttggtggtcttgtttttattgggttgctctacttttccattaaccaggtcttagggtcaagagcctgctaagatgtgtccccagtgaatttttggctttcagacatagcctccttcctctactaagtaacagagccattttcctcttgctaatcataggtaaagaggctagttcggtgatggttttagttagctcaggctgctattacatactgggtggcttaaacaacagacattgatttctcacagttctggaggctgggaagtcccatatcagggtgatagcatgattgggtgctggcaagggctcttttcctagcttgcagatggctgccttcttgctatatcttcacttggtggacaaagagaagaaaggctctctggtctcttcttttttttttttttctttttgttttgagacagagactctcagatgctctctctgtccaggctggaggctggagtgcaatgacatgatctgggctcactgcaacctccacctcccgggttcaagcgattctcccacctcagcctcccaagtagctgggattacagacttgcgccaccacgcccagctaatttttgtatttttagtagagatggcttttcaccatattgcccaggctggtctcaaacgcctgatctcaagtgatccacccaccttggcctcccaaagtgctgagatttcaggggtgagccactagccagaccacctggtcttttctcccaaagtgctgagatttcaggggtgagccactagccagaccacctggtcttttcttttaagacactcatcccatcatggggcactgtcagcctaattacgtcccaaagaccccaccttctaataccatcacatggaggtgagggcttcaacataagaatttgggggtcgaggcggggcgcggtggctcacgcctgtaatcccagcactttgggaggccgaggcgggcagatcacgaggtcaggagatcgagaccatcctggctaacacggtgaaaccccgtgtccactaaaaatacaaaaaattagccaggcgtggtggcgggcgcctgtagtcccagctactcgggaggctgaggcaggagaatggcgtgaacccgggaagcagagcttgcagtgagccaagatcatgccactgcactccagcctgggtgacagagcaagactccgtctcaaaaaaaaaaaaaaaaaaaaacaatttgggggctgggcgtggtggctcatgccggtaatcccagcactttgggaggctgaagtcagcagatcacctgaggtcgggagtttgagaccagcctgaccaacatggagaaaccccatctctactaaaaatacaaaattagccgggtgtggtggcgtatgcctgtaatcccagctaactcgggaggctgaggcaggagaatcacttgaacctgggaggtggaggttgcagtgagcagagatcgcgccactgcactctagcctgggcaacaagagcaaaactccatctcaaaaaaaaaaaagaatttggggaggatgcaaacacttagcccataatagtagccgccttccatccttattgattcagcagcatgaggaactttaaatggccagcttcggctgggcaaggtggctcatgcttgtaatccaagcacattgggaggccgaggaaggaagatcacttgagcccaggagttccagagcactcttgggcagcatacttgcccatagtgtaaaaattagctgggcagggctgggcttgatggctcacacctataatcccagcactttgggaggccgaggtgggtggatcacctgaagtcaggagtttgagaccagcctggccaatacagtgaaaccccacctctactaaaaatacaaaaattagctgggcatagtggcgtgcgcctataatcccagctacttgggaggctaaggcaggagaatcgcttgaacccaggaggcagaggttgcagtgagctgagatcacaccactgcactccagcctgggtgacagagactctgtcagaaaacaaaacaaaacaaaaaaaaaaacaggcgcggtggcttatgtctgcaatcccagcgctttgggaggctgaggcaggcggatcacaaggtcaggagttgagaccagcctggccaacatggtgaaaccccgcctctactaaaaaaaaaaattgccaggcgcggtggcacatgcctgtaatcccagctactccggaggctgagacaggagaatcgcttcaacccaggaggtggaggttgcagtgagccaagaccgcgccactgcactctagcctgggcaacaaaatgagactgcgtctcaaaaaaaaaaaaaaaaaagaaaaaaaattagctgggcaaggtggcatgcgactgtagtaccagctactcaggaggctaaggtaggaggatctcttgagcctgggagcctgggaaacaagagtgagattctgtctcaaaataaataaataaataaataaataaatagatagataaataaatacatacaataaatggccagcctcggcttccagttgaataaaaccataatagtatttcctgatctacacatttcttcctttggcactaggacctctggacccactgagtcccgggtccctggcaaggaaagcaaaaattcttcatgtgaattattaggggccacagtgggaggagccactcccatctcctctcctcggttcctggactcattctagcatggtctaagtctaggaacggcagtgctagcagaagtcccgcaggcaagggaggcaaatccacacccagaacacaggtctgtcgttgtgaggatgaggcactgtccttacaccccagtctggtcctacaaaaaaggatggcctctcagggtgcaaccttcaccttggagcagcgccctctgctggccgcctctaagatctgtggctacttgcatcccccttctaatctttccctacctctgttggttcaaatcatctctcagtttattaatccttggaaagaattacatagcggttattcacagcttgtaaattacaatagaaaggttcctttcaaatggtagagttgcactaaagaggaaattgggtttataagaaaatggaggcaaagaacttaagttttaagaaaaagcacttcaaaacagaagggcaaatggaaaagggggatataaaacaaaccaataaaaataccatctgagggtgttactgtccaaaattaaagaataagatgcatcactaagccctttgcactcgtgttgacctcgtaagtaaaaattattacttagaataataataagtggtgcacactacattccctgtccctcttctagactttttttttgtagaagaatcagaaaacaatttactaacctccctgtttgatattaaaaactcaataggaaggtttttaatattttctgtcagtacaagttgaacttgattgtgtcaactgaaaccctagaggtttgtgtatcagtagaatgcaagaacattgttaaagttgcttacaatcttttttgttttcctttccattccattgtatcaattttttgagtaactttcaaatggctagaaaatggtctttttgctttgcccttttatagctgaaataaccagctccattcttttcatgagtagtaagttgatatatttatttatcaggtatctttcagttgtcactaaatactgtagttttcttgtgttgtatggaaattatagttcaattattctaatgtgatggagtgcaacgagtcattgtagaacttttcacctgttaatgttgaagttatacctctgaacttctgctgtggatatcaaggaaataataaagcgaaaaccctaagacatttgaaaaaaaaaaaacccagcctgggaaacatgatgaaaacccatctctacaaaaaatacaaaaattagccgggcatggtggcacacacctgtatttccagctacttgggaggctgaggcgggagaatcacttaagcccaggaagtggaggttgcggtgaactgagattatgccactgcactccaacgtgggtgacagagcaagatcctgtctgaaaaaaaaaatcaatgaatcaaagaatggtgaccctagtaaatacctgatactttatttatttggctcaatgaaaataaaaaagagaattttatgcaaaaatttcagacaactgaattttgccaaatgattccatttactaaggattccatctttggttctaatgtagcatatattccctgtggaggaaatggatttctccaaataactggatccatagtcatgtaatgctagtggggacaatcaccccagcttagataccatcaaatgaattccaacatatgtgggctctcccattatttgtcttctcacctgccagcctgcctctcttggcaatgctaggattccagaatcaggccctaagctcagcaagggcctccatgagggccatattacaccctaagattcccagatgtctatttggaaccacctttgacttactcccttattttgcccctgaaactgcatggggacaaagaagaaatcataaaaacagggataatggatatggccctaagtattttaatgtggcctatcaatagtgtcgtcataccatccctgtttaccaagcctttatggcaatttcttcaccttgatactgttgacatttttggctggtcatcatttttttatgggggaattgtcctgtgtgttttaagacgttaagcaggacaggtgaggtggctcacacctgtaatcccagcactttgggaggctgaggcgggctgatcacctaaggttgggagtttgagaccagcctgaccaacatggagaaaccccatctctactaaaaatacaaaattagccaggcgtgatggtgcatgcccataatcccagctactcgggaggctgaggcaggagaatcgcttgaacccggcagaggttgcagtgaggcgagagcgtgccatttcactccagcctgggcaacaagagcaaaactgtgtctcaaaaaaaaaaaaaaagatgttaagcagcgtccttgacctctgcccagatattgccaaatgtcacttggggagcaaaattggcccagttgagaaccacgggactaaagtaagcagaattatcaggataaaacagacaattcacctctatcataccagagttttttgtttgttttttgagacagggtcttgctctgtcacccaggcaggagtgtggtagtgtgatcatagctcactgcagcctcaaactcctgggctctcaggaggctgagaagcagtgagtcacaattgtgccactacaatccagccttggcaacagagtgagaacctttctcaaacaaacaagaggaagaagaggaagaggaaggagaggaagaggaggaagaggaagagaaggaagaggaagaggagaaaggggaagggaagagaaggacaaggagaaggagaagaagaagattctggggctcaagccatcctcctgcctgagcctcccaaagtactgggattacaggtgtgagtcaccgagcgtattagtcagggttctctagagggacagaattaatggaatatatacaggagtttattaagtattaactcacaggatcacaaggtcccacaataggccatctgcaggctgaggagcaaggagagccagtctgagttccaaaactgaagaacttggagtccgatgttggagggtaggaagcatccagcacgggagaaagatgttggctgggaggctaagccagtctctcacatttttctgcctgcttatattctagccttgctggcagctgattagcttgtgcccacccagattaagggtgggtctgcctttctcagcccgctgactcaaatgttaatctcctttgggaacaccctcacagacacacccaagatcaatactttgtatccttcaatccaatcaagttgacactcagtattaaccatcacactgagcctggccaaagctggactacttgtaagcttttgtctggaaccgtgatttgggagcaagtggcccgaggacgatgaaaactatcagaggtggctgggcacagtggttcatgcctgtaatcccagcactttgggaggcggaggtggatggatcacttgaggtcaggagtttgagaccaacctggccaacatggcaaagccagtctctactaaatatacaaaaactggccaggcatggtggctcacgcctgtaatcccagcactttgggaggccgaggcaagtggatcgcctggggtcaggagttcgagagaaacatgttgaaaccccatctctattaaaaatataaagaactaatcaggcatggtggcaggctcctgtagtcccagttactcgggaggctgaggcaggagaattgcttgaacccaggaggtggaggttgcagtgagccgagatcataccactgcactccagcctgggcgacagagcgagactccatctcaaaaacaaacaatcagaggcgctgactgcagtgacagccatccggctctgacagttcctgtgcttccagcttcttgctatttcaggggctctggtcttgattcttgcaggttcccaaacctggtcctacagctccccacctcctgtctctttagtggtttagtgggcgccccctcccctgtatctttctagtgagttttaatgtgctttgcttaggtagggctggtttgtttccattattggcaacaagaaggaattcgtcaaggagtctaagaagttgtctggagaaccaagaaaaagatttcctggaagcatagaaagagtgcatttccggaagaaagattcatcaagaatttcaaacatcagggccaagtcaagcaggacaggaactgaaaggtgctcctcaaatttgcctatgaagaggccactgctggggaggagtgtgtcaggcagcagtggagggaggacagcaagtgtaaaggagactctgcaacttccacctcccagcttcaagcacttctcatgcctcagcctcctgagtagctgagattacaggcgtgtgccaccacacctggctaatttgtgtatttttagtagagatggggtttccacacaaccggaatactactgagcaataaaaaggagtgaacagttgtccctcggcatctgcagggtattggctccaggaccccctgccgacaccaaagtccacagatgctgaagtcttttctatgaaatgacataatgtttgtatatagcctcaggtatgctttaaatacctaatacagtgtaaatggtatgtaaataattatactgtattttaaattttctactgtttttgttgtcttacagttattttatatatttcatttttttcaagtattctccatccatgtttagttgaatccatggatgaggaacctgcagatctggagggccagctgtagtgatgggtgcagcaacatggatggtagcataatttcaaaaaataatatgataagtgaggccaggtgaggtggctcacacgtgtaatcctagcactttgggaagccaaggcgggcggatcacttgaggtcaggacttcgaaaccagcctggccaacatggtgaaacctcgtctctactaaaaatacaaaacttagccaggcgtggtggcaggtgcctgtaatcccagctactcaggaggctgaggcaggagaatcacttgaacctgggaggtggaggttgcagtgagtctaggtcatgccgctgcactgcagcctgggcaacagtgagactccatctcaaaaaagaaaaaattatgctaagtgaaagaagtcaaatacaagaggctacatgctatatgatttcatttataagatattctggaaaaggcaaaactataggaaatcagattagtagctaacaggggctgatggtgggaggaggtgattgactacaaagggacacgagggacctttttgaggtgacagaaatgctttatattgggaatgtggtggtggttatgtaactatacatttgtcaaaactcatcaaattgtacacttaaaaagggtgaatgttagtatatgaaaattatatctcaataaacctgacttaagaaaataataaaacaaacctaaaaacgcaacaaggtgaaaataagtctaagaaaaaaataacttacagtttttccagttcaacggtcatcatgagaatgttcttaagtgttgtaagtgggacttgcgttgttcccacgtctctgaagaagaaagccgaaacagtcatgatatgaaccccaataaaaaattctgtacttaaaaagataattcaaggacatgtgattacttcaattttggcttccctataaaacaagccagttcaacagtttatttgccgcaaaattccagagagctcttattaaagaaattaaagttgatttgcatcatcaaattaatgatattcaagagtaggtcttacactgttttttttttttttttaccattatcttacttctcagtttcatattgcattcacccatcttgaatatttactcttttcttcctttttagaataatgaacaccttttcccctttgctttcttggttaagtaatattcctccatgtgtctacatgttccaaatctatatgggttcttcaacactgttctctttcccctgctggctatcttgaccattacacatcctttcctttgccaataatgtttttcaataactcagttaaaatttaaattatgacattttagcctaaatgcaaaatacttaatctttgatgaaaaatttaaaaagagtataaatcatctcatgactcccaagagtactatagtacttaccgatattttaatgccagtaatttaaagagatacggatcttcaacagttgtcagaggattgcgattgagaattctgaaaaatgcaatggaattaaaataacctgcattttcaatgtgtgaaactgcataagaagtttacattcattttttggtatggaacttgtgggtaaaaaaaaaaatcattttctgtttttacctaataaatcaacattagactctgtaaagcattattccttcgggaactacctagatctctaggagataaagtagaggagagaaagagggggaaaaatagggaaaaaaaagtggatagcaaagaaacaatatgccacagaacttttcaggtcgaaaaccctagaagtgactatgttggtaggaagccctgattctgtaggaaacactatttctagtgtcctccataattcaagttgctcatcttcttgttttgttttgttttgagacagagtcttgctctgtagcccaggctggagagcaatggctccatctcatctcactgcaaactccacctcccaggttcaagcgattctcctgcctcagcctcctgagtagctgggattacaggtgcctgccaccacacctagctaatttttgtatttttagtagagacagggtttcgcgatgttggccaggctggtctcgaactcctgatctcaggtgatccacctgcctcggcctcccaaagtgttgggattataggtgtgagccactgaatctgaccgcttgccttttatctttataaagttattaaaatttatggtttaatttgcaaagttaagaaaaaaaaataggaccaattcttttgctttatagccaaagaaaaagggataaatctaagaggaggaactggtcaaaaccatactcccatcacatactcccacttgtcttcttgtatgacatcatagcctttgttacattgcatgtaatcacctgtctacttgtcagtctcctggactatcagctccctgagggcagagaccacatcttattgtcattgtcatccctgtgcctggcatgatgtctgaaatttaccagacatttaataaatgtttattgaataaacaaatgacattttatttgtatgtcaataaaatgaataaattctttttgatgcaaatttttattccaaaatgctggaatcaattttctttttaattctttaaagtgaacaaggaaaagaaaagaaacaggaagaaataaaagaaaatctgcctttaggttaacccaagaatcatcaccatacttttgcagaaattataaaaataataattattacagtgagtatctattgggctgctaggtatttgtgatcagcatttcacatttaatcctcacaatgccttatgggctagatattatcattgccctattttataaatgaggaaactgaggcacagagaggttacataacgtcctacatcaccaagctattaagaagcaaagctgtaatttgaagtcatgtgttttaatctgtatgaagaaaaagggtttactttaaccttatggttttttaatttttattttatttctctttctttctttctttttctttccttctttctttctatttccctccctccctccttctttccctttcttcctcccttccctccctccctctcttccttccttcctgcctccctccctccctcccttttcttttcttttttttttttttttttttgacaggaaatggcactttaatagttggggccagggtgacaggaccaagatggggctagcctgtgtcagtcaggaagcctccctctcctgctgggatagggccttgcggcagctcctcctccccgctgaggtcctaggcctgccacaggctagcatgccagtgaggtcggtggcaggagccacccagaagccccgcagatgacagagctgagaacagggacttcacttccatgtgttgccatttcctcactggaaagtccttgggaggtggctgggctcagcctgagctcagggttcttcggtgggtgttgggacggggcagggcgggcacttgcaggtggcacaggcttcatcaaggcaggacatgggcttcatcaaggcaggagccagagcacccgagccctggcaggggaggtatggcccaggatggggcagggccgtgtgctcctggaacggacatccttctctgccagagacctgctccccaagccctgtccctcccaatccccaggcagcccactctgccctccatagatgaatctaatcccatatattacaataaactgcatttgcctctccccattgccccaccctcccctaccctgagccagcggcccccacttcctcatcccctggcggtggcaggtgcccctcctcaagcagtgccacatcctgtcagcagccagctgtcctggcactggcctgagggccgggggacgcagagggcggggctgcgcggctactccaggtagatatcttctgtggggcaggtgtactccacaaactgcttgtgaaactgctggaatgctctccccacggactctgccagggctttggtggagtcttcagacacaaagacgtggcaggcaaaccggtggtcggcgaggtgcttggtgatgaacccaaagtacttgttgttctttggatgatatccgcggaaagagatgttttttaactggaaaaagtggctacatttattccccttggcctcctgggagtcatcggccttgacacctatcttcacaccccgcacgctgatctccaggacacagctggagggcgggttaaagtgcacggttagccggcgggtggtggcaatcttttgcatagcggcagagaggacgacatcgcccttgtgatagggaacctggactgagcccaggaacttcacccggaactggtccacccagtcactgtttttagccagggctgccatgtgctcgggctccttggtgacttcgatggcgtaataggcagtaaagaagccccgggcaccagtgcgcatgttgtaggcctcgtaccagtagtcttcagcctggagctccactagcagagggtcatccacttccagctcaggttcgtcttcgtgtcgaggcacaaacctgaatatggtccggtgggtctgctcctgctcctcccggttgatgatgcaggagaacagcccgaaggactcggcactggaggagcgggagcggccactcatgaagatgttcaggaacttcttggagaaatggacgtcgggttcgtcaggcgtggagtccttggagaggcaggcaggaggctggggccgggaggcctcctcatattcctctccgatggctgactcatagggcgaggagacggaggcacagttgtcatagacgatggccgagtcactctcgtcactgtagtctccgaagcacggccgcaggctcaccggctccagctgcgcgtgctcatctaccagcagcgtgggctgttggtggaggtgcctcgatctgtggtgggggcggggctgctctgggggggcagctcatcgctcaggcaaatgggttcatgcggtggtgtctgctcccctgtcttcaggggtgaggatgatcgagacacccgatcctgccaactgtactttttgcccagagaattattattcagtgtgtcctgagacaactgcacctgcggaaagaggttgagcgtggtgggccgcttgggccggtacgtgtccccgctgcccgggccctggctctggccttggctctggccctggccgcgggacgccggctcctggccggactcggccttgggcggccccgctcccggccgccgggccgcgcgctcctcgtcgtcgtcctcctcgtcgtcctcggccccgggagtgtcccccgtcgcgtcgatcaggtccatctgcagcatctcggcctgcaaccggctccccgcgccgccgccacccgcagagccctcccttttcttttcttttttcttttcttttcttctttctttctttattctcttcatgtcccttcctccctccttctttccctttcttccatccttccctccctccttccttcctccctccttttcttctttcttttttctttctttcttttttctttctttccttcatttccctccctccctccttctttccctttcttcgttccttcctccctccttttcttctttctttctttccttccttcttctttcttttcttcctctccctccctttcccttcttccctccttcttttccttccttccctccccttccttctttctctctctttttctctctcttttctttcactcttttcgccttccttccttttttccttccttccctccctccctcctctttctctctctcgcaaaaaaagagtaagcagacataatatcaatatattcatttacctcaaggactgagaataatgaatttagttcatgcaactatgattcttcttgtcatttattcaagaaactttgagattcattcccattatagctaaacactcttgacactgggaatataaagataaataactcacagtccccaccctcaaaggtttataatagagtaggagaagggaaacagtaaacaaaagtttgaagtgtgatatagtgaaatatatatatttggtctttgacctcatttcctcgtatacacttagaatctccaaagtgatatcttcttgtatgcaaacaaattgactggtagcttcaggatgggggctggcggcaaaagaccaaagcaggattagagggttgggacttttcttccccaccccccaacctcccaggaggtgagaggagctgaagattaagttcagggacagaaaaagctgcccttgaaaattcaaggccttgaaaatgcagaattaagtttgaatatgaaagggaataatagacccagtgctttgggaggctgaagcaggaggatcctttgaaaccaggagttcaagaccagcctgggcaaggtagggatgccctgtctctacaaaaaaaatagaaaaattagctgggcatggtggcatatgcctttaatcccagctacttgagaggctaaggtgggagaatcatctgagcccagggaggttgaggctgcagtgagccatgattgcaccattgcactccagcctgggtgacagacccagcactttgggaagccaaggcgggtagaacgcaaggtcaggagttcaagaccagcctggccaagatggtgaaaccccatctctactaaaaatacaaaaactagccaggcgtggtggcaggcgcctgtaatcccagctacttgggaggctgaggcagagaattgcttgaacccgggaggcagaggttgcagtgagccaagatcatgctgctgcactccagcctgggtgacagagtgagacttcgtctcaaaaaaaaaaaaaaaagaatagatttcctgtgaccaatttcgatattatttatttttagccaaacttattgacccagaatgaccagtttagataaatcgtggtcctgggatggaacacaaaaaagtggaattttattagaaaaggagaaggggagtggctattgaatattgatgttgtgttcaatatagtgagggttttttattttgttttttgagacagggtctcagggtcttgctctgtctcccaggctggagtgcagtgcactggcatgatcataacactgtagccttgaactcttcaggctcaagtgaccttcccacctcagcctcctgagtagccaggactacaggcatgcactgccacacctggctcatttttcaattttttgtagagatgcgatctcactatgttgacccggcttgtctcaaactcctgggctcaagcaatcctccgaccttagcctcccaatgcactgggattataggcaaaagccactacacctggcctgaacttttttattctaaggatttgcagagtttctgtttaagccattatcttcaaataatggttttaatttctttttaatccttatgtaaaataccttatttctttctttctttcttttttttttttagatggaatttcgctcttgttgcccaggctggagtgcaatagcacgatcttggctcaccacaacctccacctcccaggttcaagcgattctcctgcctcagcctcccgagtaactgggattacaggtatgtgccaccacgacctgctaatattgtatttttagtgtagatggggtttctccatgttggtcaggctggtcgcgaactcccaacctcaggtgatccatccatcttggcctcccaaagtgctgggattacaggcatgagccatcgtgcccagccctattattcttttttaaaatttttttaaaattgagatgggattttgccatgttacctaggctggcctcaaactcctgggttcaagcaatcctgccacctctttctcccgaagtgtgggattacaggtgtgagccagcgtgcttggctctttattttattttattttattttattttattttattttattttattttattttattttttgagagagagtcttgctctgtcacccaggctggagtgcagtggtgtgatcttggctcactgcaacctccacctcccaggttcagtgattctcctgcctccctctcaaatacctgggattacaggtgcccaccaccacgcctggcgaatttttgtagttttagtagagatgtggtttcatcatgttgaccaggctggtcttgaactgctgacctcaggtgatctgcccacctttgcctcccaacatgctgggagggtgtgagccacggtgcccagccttttattttttattttttatttttaatctgtcttgattttgcttccttcctaaacagttttggcttcgtgatcacgtaaaccaagagtcacaaactgaaatgccatcaaggggccaagcaggtaacaaaattcaagtcatacaggttcaatgtcttagtcaccccaggctacaacagaatatcatagactgggtagcctaataatacagatcattttctcagggttctagaggctagaaagtccaagatcgagattcccaaagggttaagtttctggtgttgatgcagggcaggtaagccacaaaactggggcttagactgagagggttcttggcttcacccaggaaataattcaagggcaaaccgaaggtgttagaggccaacttttttttgtttcgggacagggtctcactctgtcacccaggctggagtgcagtggctcactgcagactctgcctcctgggttcaagtgattctcccgcctcaacctcctgagtagctgggagtgcaggtgtgcgccaaaacacccaactaatttttttgtatttttagtagagatggggtttcaccatgttgaccaggctggtctcaaactcctggcctcaaatgatccacccgcctcagcctcctagagtgctgggattacaggtattactcactgcacctggcctagatgccaacttttattgaagcagtggcctatagcaacagcagagggactgctccttgcagagcagggctaccctgtaggtagtgtgaccagagtagcagctcagggcagttctgcagtcatatttacattgacctttaattatatgcaaattaaggggcagactatacagacatttctagaaaaaggctgataacttctgggttgtcaagttgttgccattgaaaggggtggtaggctgagcacagtggctcatgcctgtaattccagcactttgggaggccaaggcaggtggatcatgaggtcaaaagttcaagaccagcctggccaagatggtgaaacactgtctctactaaaaatacgaaaatcagtttggcgctgtggcaggcgcctgtaatcccagctactccggaggctgaggcaggagaattgcttgaacctggggggtggagcttgcagggagccaagactgtgccactgcactccagcctgggcgacagagtgagactccgtctcaaaaaaaaaaaaaaaaaaaaaaggcggtggggtggtaactctgggttctgccatggaaatggtggtaaactgacatggcgcactggtgagcgtgtcttatggaaagctgctttcatcctgtccctgtttcagctagtcatcaatttggtctggtgtccaagccccatctctggagtccagttccacctcctacctcagcgtgggctttattacctggcttgccttcttgaagtagcttcatgtggcagagagaaagctagggagctctctgggttctcgtctcataaagacactaattctattagatcagtgcccagctttatgacctcatttgaccttaattacttcccataaatcccctttttttttttttttgagacagagtcttactctgtcaccctggctggagtgcagtggcatgctctcgactcactgcaacctctgcctcccaggttcaagcaattctccttcctcaccctcctgagtagctgggacgagaggtgcgcaccaccatgcctggctaattttcgtttatttttttttgagatggagtcttgctctgtcgcccaggctggagtgcagtggtgtgatctcggctcactgcaacctctgtctcccgggttcaagtgattctcctgcctcagcctcccaagtagctgggactacaggcgtgtgccacgacacctggctaatttttttttttttttttgtatttttagtagagatggggtttcactgtgttagccaggatggtcttgatctcctgacctcgtgatctgcccgcctcggcctcccaaagtggtgagattacaggtgtgagccactgcactccgccaagtttttatatttttagtagagatgtttttagtagagatggggtttcaccatattggccaggctggtcttgaacacctgacctcaaatggtccacccgccttggcctcccaaagtgctgtgattacaggcttgagccatcgcatccagccccacagttaatacttaatgatgaaagactgtaagtttttctcctaagatcaggaagaagacaaggatattcactcttgccacctctattcaacattatacttaaatttctagccaggaaattagcaagaaaaagaaataaaagccacacaaattagaaaggaagaaataaaaccatatgtatttgcatatgacatgatctcgtatgtaggaaattctaaggaatccacaaaaccgttagaacaagtaaacaaattcagcaaagttgcaggtgtaagagtgatataaaaaaaattggcctggcgcagtggctcatgcctgtaatcccagcactttgggaggcctaggtgggtagatcatgaggtcaggagttcgagactaacctgaccaacatggtgaaaacccatctctactaaaaatacaaaaattagctgggggttgtggcacgcacctgtaatcacagctattcgggagactgaggcaagagaatcgcttgaacccaggaggcagaggttgcagtgagccgagatcacaccactgcactccagcctgggtaacagagcgagactgtctcaaaaaaaaaaaaaaagtaaataaataaataaattgtatttctatacagtaacaattagcaagctgaaaatgaaactaagaaaattcatttacaatatcgtttacaaacacacacttaggaataaatttgaccaaagtgctagacctttttcttatttatttatcttttggttcctaaagtatccacaccaaacacaaaataaagcaaaatcttttttttttttttttttttttttttgagacggagtctcactcttttgcccaggccggactgcagtggcgctatcttggctcactgcaagctccgccacccgggttcacaccattctcctgcctcagcctcccgagtagctgggactacaggagcctgccaccgcgcctggctaattttttgtatttttagtagaaacggggtttcaccgtgttagccaggatggtctcgatctcctgacctggtgatctgcctgcctgggcctcccaaagtgctgggattacaggcatgagccaccgtgcccggccacaaaatcttaatagtaataaattaattttgcaaagttggaggatacaagatcaacgtacaaaaatcagttgtttatttattttttaagagacaagaccgctcctctctccggtccgtgcctccaagatgacaaagaaaagaaggaacaatggtcgtgccaaaaagggccgcggccacgtgcagcctattcgctgcactaactgtgcccgatgcgtgcccaaggacaaggccattaagaaattcgtcattcgaaacatagtggaggccgcagcagtcagggacatttctgaagtgagcgtcttcgatgcctatgtgcttcccaaactgtatgtgaagctacattactgtgtgagttgtgcaattcacagcaaagtagtcaggaatcgatctcgtgaagcccgcaaggaccgaacacccccaccccgatttagacctgcgggtgctgccccaggtcccccaccaaagcccatgtaaggagctgagttcttaaagactgaagacaggctattctctggagaaaaataaaatggaaattgtacttaaaaaaaaaaaaaaaaaagagacaagaccgcactatgttgccgaggctagaatgcagtgatcatttaaaggcacaattataatgcactatagcctcaaacatggccgcaagcaatcctcctgactcagcctcccaagtagctggtactacaggtggtgcaccactacacctggctcagttgaatttctatacaccagaaatgaacaatccaaaaatgaaattaataaaacaattccatttgtaatggcaccaaaaaaaaacttaggaataaatttaaccaaggaagtgcaaactacaaaacattattgaaagaaattaaacttaaatacatgaaaagacattgtgtgttcatggattgaaagacttactactcttcacatagcaatgcttcccaaattgatctacagactcaacacaatctctatcaaaatcccaactaccttttttgcaaaaatggacaagctgattctaaaattcacattaaattgtaaggaacttcaaatagacaaaacaatcttgaaaaataagaacaaaattggaagactcacgcttcttgattcaaaatctaattcaaagtaccagtagttgagcccctgggcactggcataaggactgacatatagatcaatggaatagaattgaaagtccagaaatgagtgcccacattacgatcaactgattttttttcttttttgagacagggtctcactctgtcacccaggctggagtgcagtgatcaaggctcactgcagcctccgtctcccgatccccctgcctcagcctcctaagtcactgggaccacaggtatgtgccaccacgcccagctaatctttttttttttttttttgagacagagtttcgttcttgttgcccaggctggagtgcaatggcgcaatctcggctcaccacaacctccgccttctgggttcaagcgattcttctgcctcagcctccctagtagctgggattacaggcatgagtcaccacaccagactaattttgtatttttagcagaaatggggtttctccatgttggtcaggctggtctcgaacttctgacctcaggtgatccacctgcattggcctcccaaagtgctgggattacaggcgtgagccaccatgtctggcttgcccagctaatctttttaattattatttttagaaatggagtgtgcctatattgcccaggccggttttgaacttctggggctcaaatggtcttcttgccttggcctcccaaaatactgggattacaggtgtgaaccatggtgcccagccaaggtcaactgatttttaacaaatatgccaagacaattcaatgagagaaagtgtaggaaaaaaagtcttttcaaacaatggtcctgggacaactggatacccacacacaatagaatgaagttgaaccctcacctcatattatctataaaaattaactcaaaatataacaaagcctttgtttataaaacatttgttagactgaaaagtagaaaactcttttttttgtttttagatggagtcttgctctgttgctctgttgccaggctggagtgcagtggcatgatctcagctcactgcaacctccacctcctgggttcaagccattctcctgcctcagcctctggagtagctgggactacaggtgcgtgccaccacgcccaactaattttttttttttttttttttttgagaccgagttttgctcttgttgcccaggctggagtgcaatggcacgatcttggctcaccgcaacctctgcctcctgggttcaagcgattctcctgcctcagctcccaagtagctgagattacaggcatgcgccaccatgccccgctaatttttttgtatttttagtagagacggggtttctgcatgttgatcaggctggcctcgaactcccgaccacaggtgatccacccaccttggcctcccaaagtgctgggattacaggcatgagccaccgtgcccagcccagttttttgtatttttttaatagagacggtgtttcaccatgttggccttagaggaaaacatagacatacatctttatgacctttggattagcaagttttcttagatatgacacaagtgtttaacacagagctcccatatgacccagtaattccattcctaggtatatatgcaagagaaacgaaacagaaaaacttaaaacacacacacatatggcgaaaccctatctctactaaaaatacaaaaattttgctggtgtagtggctcatgcatgtaatcccagcactttggcaggctgaagaaggtggatcatttgaggtcaggagtttgagatcagcctggacaacatggtgaaaccccatctctactaaaaaatacaaaaattagctgggtgtggtggcacacgcttgtaatcccagctacttgggaggctgaggcaggagaatctcttgaacccaggaggtggagcttgcagtgagccgagatcacaccactgcactccatcctgggcaacagagactctatctcaaaaaaaaaaaaaaaaaaaaagaaagaaaaattagccgggcatggtgacaggtgcctataatcccagctacttgggagattgaggtgggaggatcagctgaacctgggaagcagaggttgcagccagccaggattgtgccactgcactccagcctgggcaacagagtgagactccgtctcaaaaaataaaaataaaaataatacacacacacatatacacatacacctctttatttcttcagtgagacctgaagatatatatccataacataagaacaggatgctataaaaaatgaacaataagaaagcaagaaaaactatcataaattagaaatatgatagccaaggctgggtgcagtggctcacacctgtaatctcagcaccttgggaggctgaggcgtgtggatcacttgaggccaggagtttgagaccaacctggccaatatggtgaaaccccgtctctactgaaaatacaaaaataagctgggcatggtggcccacgcctgcaatcccagctactcaggaggctgaggcaggagaatcacttgaacccaggaggcggaggttgcagtgagctgagatcaagccaccgcattccaacctgggtgacagagtgagaacctgtctcaaaaaaaaataaataaataaaagccaaaattaaaaattcaatacaaaatttgaaggttgaagaaatctcctagagtgtagtatttaaattctttttcttttgagacaaggtcttgctctgtctcccaagctgctgtgccgtggcgccattctagcttactgcaagcctcaaactcctggcctcaagcaagtctcatatctcaacctctcaaagtgctggattataggcatgagccactgcagctggccagaatgtagaatttaaaaggtgttgaaaaatataaaaaataagaaaattggaggattgaggctggttgaaggcagaggcaggagaatagcttgagcccaggagcttgagtatagcctgggaaacacagaaagcccatctctatattaaaaaaaaaaattctttttttttttttttttttttttttaagagagagtcttgctctgtcacccaggctggagtgcagtggtgcgatcttggctcactgcaacctccaccttccgggctcaagcaattcttatgcctcagcctcccatgtagctgagattataggtgtgtgccaccacacccggctaatttttgtatttttagtagagacagggtgggggagtgttgggggagatggggcatggcagggaggggatggcgggttttaccatgttggccaggctggtcttgagctcctggcttcaggtgatcctcccacctcagcctctaaaagtgggattacagacataagccactgcgcccagcattttttttttttttttagacagtgttgctgtgttgcccaggctggagtgcagtggcacaatctcggctcactgcaacgtctgcctcctgggctccagcgattgtcgtgcctcagccccccagtagctgggattacaggtgcacaccatcatgcctggctaactgtatttttagtagagatggggtttcaccatgttggccaggctgctctcaaactcctggcttcaagcaatccacctgcctcagcctcccacagtgctgggattacaggcctgagccactgcaccaagccccagctccagattgtgagtttcagagccaggctagataggattcagactcagaactgtgagatttctgctgctcaggctgttaaccagtgactcatggtttttttttttttaggcagagttttactcttgttgcccaggctggagtgcgatggctcgatcccagctcattgcaacctccgcctcccaggttcaagtgattctcctgcctcagcctcccaagtagctgggattacaggtgcccgccaccatgcccagctaatttttgaatttttagtagagacggggtttcaccatgttggccaggctggtctcgagctcctgacttcgtgatctgcccacctcggcctcccaaagtgctggaattacaagcgtgagccaccgcgccctgcctgacttgtggtcttttgagattatttctgatgtcccatagacatttcaaaagcaaaatgtcaaaagctacacttgcctctcaaaccttcattctctctgtgtgataggcaccctccttcccatcttccttcgcttccatgggtcactcaaagctgaagacctgcaagccatctcaggatcctgtcctgtatcccatcaacactcatcacaccctctcaattctggctcctaaataccccttggatttggcctctcctccccgttccccactggcattgttttatttcaggtctttatgatttcttgcctgggtttctgcagcagcctcctaactgctctccctgactccagtcttgccctctctgtttcatttttcatattgcacacagggtgatttttctaaaatgtaaatgtgaccacatctcttgcaggcttaaaacctctcaaaggttcttcacctcctcaaggctgcagcacacacctcccagcacagctctgcaagttgaccccgcccttcttctccatcggtggttctcagagtgtagccctaagagcagcagcactctgacccgctccatcaagatctctaggcttggagcttgcgagactatgtaaacaaggccagttttttgttcgtttgtttgttttttggagacagagtctcgctgtgtcacccaggctggagtgcagtggcttgatcttggcttactccatctccacctcccaggttgaagtgattctcccgcctcaacctcctgagcagctgggactataggtgtgcaccaccacacccagctaatttttgcatttttagtagaaatggggtttcaggccgggcgcggtggctcacgcctgtaatcctagcactttgggaggccaaggcggacggatcacgaggtcaggagatcgagaccatcctggctaacatggtgaaaccccgtctctactaaaaatacaaaaaatttagccgggcatggtagcgggtgcctgtagtcccagctactcgggaggctgaggtaggagaatggcgtgaacccaggaggcggagcttgcagtgagccgagatcacgccactgcactccagcctggacgacagcgagactctgtctcaaaaaaaaaaaaaaaaaaaaaaaaaaaaagaaagaaaaagaaaaaaaaaagaaatggggtttcaccacattggccaggctagtttcgaactcctgacctcaagcgatccacccgccttgacctcccaaagtgcttggattaccggtgtgagtcactgtgcccagccaacaaggccagtttttatgcacatttaagtttgagaaccacattgcagttaatctcatctggtttcctttcttgaactccatgctttagcctcattgaaccatcagtttctggaaaatggtatattatccctcaccttctataatttgcacatgctattctctgcccttatcccatggcaatggctttgtctgcttttatccatattccccacctctgtggaaactggaaggcagggtcaccaccttattcatctttacatctttagggtcttggacctgacatacagtaggtgctcaataactattttatttctctctctctctcttttttttttagagaaggggtctcactctgtcacctaggctggagtgcagtggctcaatcatggctcacctccccctcaacctcctgggctcaagcaatcctcctgcctcagcctcccaagtagctgagactacaggcactcaccaccatggccagctaatttttaatttttttgtagagatgggggtcttgttatgttgccctggctggtctccaaatattggccttaagtgatccttccacctcagcctcccaaaagcgccactgcactacagcctgggcgacagagtaagattccatctcaaaaaataaaaataaagataatacacacacacatatacacatacacctctttatttcttcagcgagacctgaagatatatatgcataatataagaacaggatgctataaaaaatgaacaataagaaaacaaggaaaactattataaattagaaatatgataaccaaggctgggtgcggtggctcacgcctgtaatctattacaggcgtgagccagtgagcctggccattcaataactattttcttaatgaacattgagggtgagatgagcagaaacgtaactgctaaaagcaggcaacattcagctaccaggatttatgagggagaacacagtaaactgtgctattacttaggaatacctagagtcaatgtacatttattttcattttactctagccccactggtgatctctgcccagtaatctaactaaattgatgacagtgggaataaaaggaaatcatagatatgtattattgtaaaggaaaagaaatgcaaatgaatgggtacagggacagtctatacaattgaagatctcatctcttcatatatatatatatatttttttttcttttttttttcaagacaggatcttagcacctactatttgcaagactccccctatgttaacctttacagcaactctcggatggatgttttattattgagagaactgagagacagaggtcattaaatatttgtccaagatcctacagctgcaacatggtaaatccactgctattggaacttcctgttaagtgagttccatggccccaaactgcattcccacccatgttgctcacagattggtcacaatgtggctcacagtcataggcacaggtgaatggaacaaccattattttcgataatgattctggggtatcatctttgactcaaaaacgcaaactgttattattatctatgcagtctacagccctctgctctaccagctgagctatcgaagagtgcacaagctgttattatatcacaagattttttttttcagacagggtcttattctgcggcccaggctgaagtgaagtggctcgatggtagctcactgcagccttgaactcctggggtcaagcgatcctcctacctcagcctcccaagtagccgaaactacaggcaggcaccactatgcctggctgacttttgtattttttgtagagacggggtttcgccatgttgccaggctaatctgcaactcctgggctcaagcagtctgcccacttcaccctcccaaagtgctgggatttcaggctagagccaccatgcccagcccacaagatctaaacgctactgttgaagcaaaaagacttgaagacagaatttgccctcctaatataagcccatggtaacctgaacctccttcaccctaactctcatcacagtgtattgtgattacttattgaggatgaaatttgattttcctttttgatgtacttctccaacacagtacctggtatgtggaaggcactcaaactagggccaacctggtgccagctaacctgggactagtgcaagctcctgaaattcacctggtcaagggacacatgttcacaggatctcctggggttgtgtcaccaaaaaaaaaaaaaaaaaaatttcacctggtgtctctagtcaccatgattttctctaaaatgccacacagaattctatgtatggaatttttttcttttcttttttctttttctttcttttttttttttttgagacagtctgtcgccagtctggagtgcagtggcgtgatctcggctcactgcagtctcctcctcccgggttcaagcggttctcctgcctcagcctcccgagtagctaggactacaggtccgtgccaccacgcccagctaatttttgtatttttagtggagatggggtttcaccatgttggcaaggatggtctagatctcttgaccttgtgatctgcccgcctcagcctcccaaagtgctgggattacaggcgtgagccaccgcgcccggccaaaattttttaaaaataaggaaagttcaagtttactttagataccatagttcaggatttaaactcctgtccttactttggaatgtcattttagatacttatgtgattgactgaggaaaaagacattgtaactgatcttatccccttttaaaaaaaaaaccagctaacaattattcatttagtcttctgtacattgtgtgaaataaaatatagaagactaggggacagtttctgccctcaaggagcttatgtggtttttttcgtgcgtttttttgttgttgttgtttttgtttgtttgtttgttttttgacatgttcttacactgtcacccaggctgaaatgcagtggtgagatctcggctgactgcaacctctgcctcccaggctcaagcgaccctcacctcagtctcctgagtagctgggactacaggcatgcaccatcatgcccagctaatttttgtgtgtgtgtttttgtagagacgaggtctcgccctgttgcccaggctggtctcgaactcctggcttcaagtgattcacctgcctcagcctctcaaagtgctgcgattacagtcatgagccgcctcaccccgccagtcaggctcttaaaaaatccatcacacaggccgggcgccatggctcatgcctgtaatcccagcacttgggaggccaagtcgggcggatcacgaggtcaggagattgagaccatcctggctaacacggtgaaaccccgtatctactaaaaataacaaaaaattagtcgggcatgctggcggacgcctgtagtcccagctactcaggaggctgagacaggagaatggcgtgaacccggaaggcggagcttgcagtgagctgagatagtgccactgcactccagcctgggagacagagcgagactgtgtctcaaaaaaaagagaaaagaaaaaaaatccatcatatgtattcactaatttaatcttcacaacaactctaaagggtaggaactattttttttgccccattttacagatatgaaatgagaggctgtgttgaaggtgttttctggggttgatttaaatagaattaataaactcagaaaaaagattcttaatcgataaaggtggttttttttttttttttttttggttttttttttttttttttgagtcggagtctcactctgtcatccaggctggagtgcagtggcgtgatatcggctcactggaacctctgactccctggttcaagcaattctcctgcctcagcctcccgagtagctgggattacaggcatgcgccaccatgcccgtggtttcaccatgttggccaggatggtcttgatctcctgaccttgtgatccgcccaccttggcctcccaaaatgctgggattacaggcgtgagccaccgtgcccggccttggctttcattcttattgtcccatggttaccagagcctaaagaggtaaagaggtaagacctatgaggctctcacagttttttttttttttttttttttttgaaacagggtctcgctctgtcgcccaggctggagtgcagtggcgcgatcttggctcactgcagcctccgcctcccggttcaagcaattctcccacctcagcctttccagtagctgggattacagaggcgcgccaccacgcttggctaattttttttttgcatttctattagagatcgggtttcaccatgctgcgcaggctggtctcgaactcctgacctcaggtgatccacccaccttggcctcccaaagtgctgggattacaggtgtgagccaccgtgcccggcctctctcatagttttattattctattttccacagacccttcctcccttaattttcatgcctctttaatattgtttcttttacctcactgacattctttttcgtcctcctaccttttactgtgggtgtcttattacccttctttgggagtttatcctttagcatgtcatagatcactatctttaggcagaggaccctgcatcttctctagtcctgattgtctaccctttctcaagttccataacttcagttgcctctgggacaccttcactgggttttacaaaaccctgttaccgggaactgaacatattaaaagctaagattcctccccaaatctgcatgttgcgccaattttcctgcccaattatcttgtctgtcccctggttttgcgaccttatttaaacatttaaatccttttctttaaattggaatcttgatgagtggtgcaaaaatcaatggatacaaatgatatgccgagatatgtaagtcttccgcccactggttccctaggcactcagttcctctcccaggaggtaaccactgttgccagctcttagagtgatttttgattccttcttctaccggctctatctcaagtccttccctgtctgtgagatgtgtgccctttcctttccaggccctagtgaactgatatctggttgagtttatatataaacatttatatgtgtatattttatatacatatataacatctctccctatggccttccggcctggagttttcatcacgtcgcttcctggatgaaagaatctcgaggggtgaggggcaggggttgggggtgatggagaagagaacctaaaggggacttaggtagggggttcagagttgccaactggcgtgacgctctgtcaggattcctattcctattcctcccacctcaggcccccttctagtcctctcagccaaaagcctctcgtttccaagggctgagacagagacagagacaacgagatgcacagagacagagacgccaaggcacctgcatccctcttccccttctgtcccgccccatcgctctgacggacaccattgctcagccaatggcgctcacgatgtgcccctgaagggccaatgagcgccagaggagggcggaagattccccgcccccacttctaggcttggttgaaccgtgcaggtaggtccggggctgggggagctgcctttggcactggtgcccctgggggtgggggcacgagtgggccagggtgatggtgaggtagaggaggtgtccctgacccgacgagctcgagggagcggcctggctgggaggcggggggccgcggggcccggggagcgggcgccgccgagggccctggaagcggcggggctgggggagaggggacgcgtgtgtggggcacggggacgcccgcccagcgcccactcgtaggcctgggacgcgggctgccggccgagtggcctgagggcctggctgcccggggggcgggccggggccgcggccgggggcgcggagcggagctcggggcgccaggccgagccgaggtgggacggaccgacgcggagaggaagggaagccgcatcccgcggggcgcccctcctgaagcgagccgggcagcggccgcgggcgcccctgccctgagcccaccccgcgctctgccctccctaacaatgggaatggggcagaaggaggcgccccactgcggggaggtgaggggtgggtttgggactggggtccgcggtggggggaggtgcgatctcgggctctcgcctctccgctccctctggctctggagttgggggcccctgtggggctctgaagtccgcctgagacttgggtcaagagtcaaactgtcgccccccgctcctcccccaaaatccggtgagcggtaaggaaagtgatgccaagtcttcgaagcctcagtgacaaacgcatagcaagaacacatccactccagaggtgtttattttttatttttatttaaaaaggggtacttttcgacatttatttttaagaagtgggtgctgttatttttgtccctacgcgggcaagcctccattttaagcgaagcagtaactggttaagctggaattgtatacaggcccaggacttgaacgaggatcctaccagaggtcatttagtccatcctcctgcctccaggcaaatttaccttcctcccaccctcaaaattaagttgctcggtctgcttttaacgatctctggggaagaagggtcctttatttgtttctagtacttcagtcaagaataggttttacttttcatgtggaattgactctgaaacttaagcataatcttgggacagtcgggatgattagagaagttttactttactaaatataattaaatgtggcaagggtcttttttagacggttaattaacaaatcacgtttagtgtttatgaagtaccctggaaaattactttattctctctgggattttggctaattgtttgataagcaattttacattatctaaaatacgtgttacatatttatttctctttttatgtaaagtatgtttctacacacatatatatggagacacacatttgcccttttctaaaggggactgtattttctatacttttttagtgcgatgaggcaaatagtacttcaaaatccctgcccaggtagcttaaactatttgcattgtcttgattattttttagtctaaatgaaaatcctctctttcagataccttctcgaaacaaaagattttcctacctgcttatacttggtaaccgagggaatttctaagacttcttgctcatttctgagtattgtctttatatcctgacactatgaatgctacttggatgcctcttaaggtaagatgtgttattttttcattaccagcctcattttattcatttttctttagaattgggaatattgtagtttttgaatttgctattcttcacttcctttacctgccatttctcttgcctcttgtgtttgcttcctaggattgattggctatatcttactttgtatctctactgttctttgattatcggtgtgaatgttttaatgaagttctcaaattaacttccattataatgaaaggcagtgatctttttaactttaaattatggcaacttacatagttgtaaaattatgttccggtcttaggatgggttggcaattcaaacatctaggtccacttttcaaacaggtactttagagtcataggtactagggtgtgtcccactcttgcaaatcagtagctgattcacgtgttacaaaagatgtgtcattaaccatttgtttactctgaaacttcatatagtatattagggcattctaagacctgctggtttacacgtatgactctttcagagtcctcctgctgcaccccagtcctttgtgtgacatttcatactatttttctcagcaggtagcacttacaccaagttttatttcacagggtaaacctcatttggacagtgtggacagatgacctttagatgaaaaagctcccattgatgtggttctccagtctctttggctcctctaatctcttgtacatagatggccaaagaactctccattaggactaagcaaagggcagagcttaagacttaagtaggtggcttctttgattttcttgtgactaaaaatacattaaaaaataaaattaaataaaaacaaacagaaaagacgtaaggaggggatgggaggaaggacagagaaggataaggagtcttggaaaccctccaccagcttcgcctttcttcagagttggatactagcttagttaagattgttgggtgctaatctgctctgtggacttccagattgatgcagaggagaaatcagacaatagtgcagtgtgtgtaacctatatatctggacttgtgggaaatcttaggtcatgtaggctgagttctcatcttcatttatgtttcagctgctattgctggataagagtgcttatattaatatacaggaagccaaagtgacacagtttttccagcattctccctgtagagttggaggggttgcatggggaatgcaaccagaagttctgaacccgttaagaatcagaggacctgtgtaagagtgtttcgacttagcaagtgttgagcaccagtgttggtggcctctgtcctctttaggaagcaggcaaggggattgagatcaatacattggatttcattttatagtttcctaggttttaacgaatgtatttggtacacaaagccctacttttaaagctatttccagtgtttaaggttttacctctaaatctctctgaacctgggttgtaatacagtaacctcagaagttctactagaggtctctggcatggcaggaatagagaaaggaaatcagctccatatcgtgagttaccacctgttactacttaagaatgcagttaggtggttgccttaatattatgttccttaccaatcctttgctcagtgggaaacatcttctaagtgtaaaccaatttttgggggtaatgttttcttcctatttttattacttagaaaccttaaaaattacagtgttcgtctggtcagaaaaaaaggtcctttttgcggggaggatagcattgagtttgtgggctggaaaatagaagtggggagagggaactttattctctttttcattggtgaatatccttaaaacatttctaagatgtagtttcagattggagctacttaatttaagtaaaaagaaatgataggttaattaaagtgcatattttggagcccaaatgtttattttatatagatcttatattttgtttccaattatcttattgtagaatgaactctgtcgttctgtcaggcattgcgtaaatgttagactgagtatgtgcttgtttccatgcgtatagaaaatagcgtcacactcactcagtcttcacaaatgaaaatgccagaggaggcaagtaacaaggaagaataactccaaaccaaaactcctcaatttaaggcactctcgttaattagaagttctcatggaaattattatttatccctttttctctgtgttaggggtctgtacctttttaaagcctgaatatttctagccacgactaagcaatgtcagtgatgttactagggtctagttgtcagggttagggctaaggagtgggtgagatgggagaggaatagggaaaggaaggagaattgagtgagttggagaaaagagtgaaatgaagatgaggaggagagaaaagatacagggtctttagtgtgtagcatggagccatcatcagttgtctcaggtagttcttagggctgctggatgccttgtgtgctagactgaactatggtgaaatgaagtaaaaactgttcttgacaagcaaaacgagagaattaaaacataatttaatatgatatagaaagatctgcaaggcagacagttaagtgatgaaagcaagatgcagaacagtatgtatgatttgataccctttgtgttttttgggaaaaaaaaacaggagaaaaagataatttgcattggtgtatgtatgcaaaaaaacaaaaaagatatttagggctgggcatggtggctcacacgtgtaatcccagcactttgggaggccaaggtgggtggattacctgaggtcaggagtttgagaccagcctggccaatatggtgaaaccccgtctctactgaaaatataaaaactagctggggcgtggtggcacacacctgtaatcccagctactcgggaggctgaggcaggagaattgcttgagcctgggagacggagcttgcagtgagctgagatcacgccactgtactccagcctggctgaccaagcgagactctgtctcaaacaacagcaacaacacaaaactttagaaaaataaataagaaaatggtggcactggttacctgttaggtctaggaattgttcaggtagaggacagagtagggaggagacttctcattgcattatatctttttacactttctgatgtttgtatcagattttaaaaattaaatagaaaattgaaaattttagctgggcgcagtggctcacgcctgtaatcccagcactttgggaggccgaggagggcggatcatgaggcaacatggcaaaaccccatctctactaaaaatacaaaagaaaattagccaggcatggtggtgtgcacctgtacttgcagctacttgagaggctgaggtgggaggatggctcgagcctgggaggtggaggttgcagtgaactgtgattgcgcccctgcagtccagcctgggtgatagagccagaccttgtctcttgtctcattaaagaaaaaaaaaaattaacttgttcttaaagttttagtaaaaacaggttttcattgtatatccccttaagttagcaattagatataatctcagcattcttcttcttttttttttttttttatgaaacagagtctcgctttgttgtccaggtgatcttggctcactgcaacctccacttcctgggttcaagtgattctcctgcctcagcctcccgagtagctgggattacaggcgcctgtcaccatggccagctaattttttttttatttttagagagatggggtttcaccagcttggccaggctggtcttaaactcctgacctcaggtgatccacccgcctcggcctcccaaagtgctgggattacaagcatgagccaccgtgcccggcctaatctcagcactcttaaccgtgtgactttgggcgatttcttaatctcttaatttcttaatctctctgagattcaggttcctccttcatactggaaataataacacttacttcagaggacttttgtattatatctgtaaaggacatagggcagtgtttggctcagtggactactacttatcgtaattactaattttttttttttttgagatggagtcttgctgtgtcgcccaggctggagttcagtggcacgatctcggctcactgcaacctgcgtctcctgagttcaagcaattctcctgcctcagcctctcaagtagctgggattacaggcacatgccagcatgcccggcttgtttttctatttttagtagagacggggtttcactatgttggccaggctggtctcaaactcctggcctcaagtgatccacccgccgtggcctcccaaagtgctgggattacaggcgtgagccaccacgctagctcttattgtaattactgttaataatagctcctcatagcctagtggtgagagagagggctctggctatgtgatattgggtaagctcattaacctcttagaacctcggcatccacaccgtaaaaagggtgtaatgatagtacctagatcctagagtggactttataaggattaaatgagtttattcacgcagagtgtttagaacagtacctggtaggtacttagtaaacctgagctgcgaattttcttatgacatctgtttgctaaggctgctgccacagagtgacatatgctgagtggcttaaataacagaaatttattgtctccctgttctggaggctagaaatctaagggcagaggcatgctttctctgaagctactgggacaggatctgtttcaagcctctcttctagcttctggtggcagcataactccagtccttatgtagagttctccctgtgtatatttcttttgtttttttagacaaagtcttgctctgttgcccaggctggagtgcagtggcataatattggttcactgcaacctctgcctctcaggttcaggtgattctccttccttagcctcctaagtagctgggattacagtcacgtgtcaccatgcccaggtaattttttgtattttttgtagaaacagggtttcaccatgttgcccaggccggtcttgaactcctgacctcaggtgatctgcctgccttggcctcccaaagtgctgggattacaggcatgagccacagcacccagcctaaattttgtattttttgtagaggcagggctgcaccttgttgcccaggctggtctcaaactcctgaccttaagtgatctgcccacctcagcctcccaaagtgctgggattacaggcgtgagccactgcgcccagcctccctgtgtgtatttctttgtgtccacaatttccccttttttataaggacaagtcataatgggattagagtcctccctgatgacctcattttaactttatgacctctttggagatcttatctctttcttttttttcagagtctctctttgttgcccaggctggagtacagtggggtgatctcagctcactgcaacctcctcctcctaggttcaagtgattcttctgccttagccttccaagtagctggagttacaggtgctcgccaccatgcctagctaatttttacatttttggtagagatggggtttctccacattggccaggctggtctcgaactcctgacctcaagtggtccacccacctcggcctcttaaagtgctgagattgcaggcgtgagccaccgcacctggtctgaagatcccatctctaagatcacattctgaggtactgaatgttaggagtactacatatctcttttttttttttttttgagacagggtctccctttgtcattcaggctggagtgcagtggcacttggatcactgcaacctccagccccccatcctcccgtatactctaaatcagtggtccccaacctttttggcaccagggactagtttcgtgaaatataatttttccacagagccgggggccggagagggggatcagggatagttttgggatgattcagcacattgcatttactgtgcactttatttctattattattacgttataatatataatgaagtaattatacaaactcactgtaatgtagaatcagtgggagcctgagcttgttttgctgcaactagatggttccatctgggggtgatgggagacagtgacagatcatcaggcattagattctcataggagcacgcagtgtagatccctcacgtgcagttcacaatagggttcaccctcctatgagaatctaatgctgcagctgatctgacaggaggtggagctcagttggtaatgtgagccatgggaatgggacgcggctgtaaataccgatgaggcttctctcactcacctgctgctcacctcctgctgtgcagccccattcctaacaggcccagttcttaagagtactggtctgtgccccaagggttggggacccctgctttaaatcacctctagattagttataatgctgaatacaacataaatgctgtataaatagttgtgaaacgctattgttcatggaataatgacaagaaaaaagtctgtacatgttcagcacagatgtagtttttttttttttcctgaataatttctatctgtggttggttgaatccatggatatggaacccatggatgtggagggccaattctatagtaacaagtcactgtctcattcctgtcccttaaccattcggttcccctcgcatagacaacttttttttttttttttgagacagagttttgctcttgttgcccaggctggagtgcaatggctcgatctcggctcactgtgacccctgcctcctgggttcaagcgattctcctgcctcagcctcctgagtagctgggactacaggtgtgtgctaccatgcccagctcatttttgtatttttactagagatggggtttcaccatgttggccaggctggtctcaaactcctgacctcaggtgatttgcccacttcggcctcccaaagttctgggattataggcatgagccaccatgcctggctgacaaacatttttatttcttatatatctgtccagacatattttatgtatatactggcagctctatatacatatattcccattaaaaaacacattagtagtatactattcatgtgtaaatatacttttttttttttgagatggagtttcactcttgttgcccaggctggagtgcaatggtgcgatctcggctcactgcaacctctgcctcccaggttcaagcgattctcctgcttcagcctcccgagtagctgggattacaggcgtgtgccaccacgcccagctaattttgtatttttagtagagatggggtttctccatgttggtcaggctggtcttgaactcccgacctcaggtgatccacccgcctcggcctcccaaagtgctgggattacaggcatgagccactgcgcccggctgtaaatatgctttttgtaggttctcttagttcagatgtaggaccagtctgatgttaggttcttaggtaaggacctatataaagatagtataaaatggtacctaatattacaaagcttttttaggaatggcaaagggataatatggcagcttcctccctgtcagttctgcattggtgactaaggatctcaaatttctggataatctggcttgcttagttacgacgagagaccagaacttgctgatagcatatgaaatcttcgggggagttttgaatgtttttcattttttaatctgatatgatgtagcagacatgacattgactcacatgcaagccccaaacatgccgaagctgcgggagctctctatcagccatagtaggctgctctgttgccgttggttcaggcagctgttgagtgggcctgggaggcacggagggaaagggaagagggccggcactggtttactctcctagacatagtcgtgaaatctcatggtcaaaggaaaccaagaagtcatcttatcctgctactattttccttccagggtctcttctgcagggtccccatgaattgtggctgaagttgtgcacaaacaagtatctccagtgacaggagtgccttctgaggcagccattgcatcttcatctgctgacactctgctaggctgacttctgtagttttcaccactgatcttcagtccacctcacagagctctataaaacgcttaaatcctctttacatcatagactttcagctacttgaagatagccatcagccgctacgtgactcttttctccaggtaaaatctccaattatagcagctgttcttcatatggcctagtgtctaatgcctttgctctcctgatcattttttgaattttttcagtttgccccggtctcagagtgtgggatccagcactgcccatataacgttcccaggatgttctgactgatgtagagtaagcctggtatcacccatgtcctaggaactgagaccccgtcactactggtgatgcagcctaggatcaaactgttcttttggcagccacttcacatttttgtgttaagggcttactcttagccaaacacaaattttgttttgttttgttttttgttttttccgagacaggttctcactctgtcacctaagctggagtgcagtggcaccatctcagctcactgcaactgctgcctcccgggttcaagcaattcttttacctcagcccccccagtagctgggatcacaggtacgcgtcaccacgcctggctaatttttgtatttttagtagagatggggttttgccaagttggcctggctggtttcgaacccctgacctcaagtcatctgcccaccttggcttcctgaagtgctgggattacaggcctgagccaccacacctggctgacagattgttgttatcattaatgtcacatgaactactgccaaaggcgtctccccttcttgtgcttggagggtgtgttggatgccacctgtgcccctccctggagatgcttttggccccacagcttcctccagccaatgtagcagtgactgggtctgtgcaggttttggtcaccttcactcaggtgtgatggggtggtgcctttctttggcctgccccaggtatcttttactttttgggatgtatttgatgctatagtatggaatgctgcagagacttccggcaccaaccccctggagttggactttatttcacaggttgagggcaccatcctccacaagaatccccaacttcagccaccagctggcaacaggtttgggggtcctcagcccaccctcacttctggccagatggctacaaatttggcgatttccactaccccctcaggtttgatcacttgtcagaatgattcacagaattcagggacatgctatgcttacaactacagttttattaattgatcaataaagcaaaaggatataaatgaaccagtcaaagggaaagacacatagatctgggaggacaccaaacgcaaagctttcattgttctctccccgtggagtcaggggctgttacctttccagcacatcgatgcgtgacaatgtatagagtattgccaaccagggacgtgctcctgagcttcagtatttgtcatttttattggggcttccttgcataggtacgattgattgaatcattggccatgtgactcaaactttagcaccctcatttccccagaggtgatcttgttagcatccactatctaggggcccactctgagtcaccttgttagcatcaacttagaggtgtgggcccgctatgataacaaagatactgctgatcgggcgcggtggctcacgcctgtaatcccagcactttgggaggccgaggcgggcggatcacaaggtcaggagatcgaaaccatcctggctaacatggtgaaaccttgtctctactgaaaatacaaaaaattagccgggtacggtagcgggcgcctgtagtcccagctgctcgggaggctgaggcaggagaatggtgcaaacccgagaggcggagcttgcagtgagccaagatcgcgccactgcactccagcctggcggacagagccagactccgtctcaaaaaaaaaaaaaaaaaaaaaaaaaaaaagatactgctatcactctgaaaagtccaagggtttagaggctaccttctagaaactggggacaaagaccagccaaattcattactataagatgcccataggaatctcttggtgttcataccaatgtgacccagaagtatgggtggcctaacacctgttgagttgttcttgagcaacagggaatgggtactgaaggatacttgtttcctcttttgtcctctgggtggacagttctgacaggcatttgatatggcttcttagaatgtccaacaacggtgagcagtggtcccatagtgggggcccagcttgataactcgtccttctattgtctgtccctcctgccctgttttactccctcagcccctcattcctgatctctgggatcacttcccaaagaacgtacctgcacttaagcttttgtctcaagttttgctttagagggctagccctagaatgcttttattatactaaactttacatgttttaaaaaacaatgttttggccaggggcagtgtctcacgcctataatcctagcactttgggaggctaaggcaggcagatcacctgaggtcaggagttcgagaccagcctgaccaatatggtgaaacctcgtctctactaaaaatacaaaaataagcagggtgtgatggtgtgcctatattcgcagctaatcgggaggctgagacaggagaattgcttgaacccaggaggtggaggttgcagtgagccgaggtcacgccactgcattccagcctgggctgcagcaagactccatctcaaaataaataaattaattaattaaaaaaaagtttttttccctgacgtggaaattaagtgattagaaaacgagactaactttttcaggatatattcttgttgttaatatggtgcagggctgtgatgcttctgcaaaatgtaagttgagtgtatagcaggcctcctaactctagagatgatgtatccttccgtatcgattgcctttgtgaagtcacacacataagcagggagaagtcgtgaagatacataaacagctgcgttttccaggctcagatcactaacatgctcgtgatttctttctaggtctgatttttatggttgacagtaatgacagagagcagattgatgaggcctgggaagtgctaacttacttgttagaggacgatgagctcagaaatgcagttttattggtatttgccaataaacaagtatgttgttattggctttctgaatgctggaactgaaatttactgccaaatgtctcacttgtaaatacagacatttaaatgagatgtctgcctccctctctccagtaccaaccataatatctcccaccatctccttgctagaatgtctttttttttattgagacagagtctcactctgttgcccaggctggagtacagtggtgtgatctcagctcactgtgacctccacctcccgggttcaagtgattctcctgccccagcctcccaagtaactgggattacaggcatgcgccgccatgcccacctaatttttgtatttttaatagagactgggtttcaccatgttggccaggctggtctggaactcctgacttcaagtgatctgcccacctcgacctcccaaattgctaggattacaggtgtgagccactgagcatctactaagttccagacttggttttaggcttaaaccaagacagataaagtccttgtgttcttggagtttacgttgctagtgggaagagagtcaaccaataaataacatgaaatgtgccaggtgtggtggctcatgcctgtactccctacactttgggaggctgaagcggggggaatcacttgagcccaggagttcaagaccagcctgggcaacatagtgaaaccccatctctacaaaaaagtacaaacattagctggatgtggtagcatgcacctgtggtcccagctattcaggaggctgaggtgggaggatcacttaagcctggaagttcggggctgcagtgagatgagattattccattacgctccatcctgggctacagagtaaaataaataataatacgtgtcaaatggtttttaagtgttgtggaagaagcaaaagcatagtaaaggggcagggcgggtgtgggaaagactgggaatgcctctctgatgagatgacatctgagcggagaccagaaggctgggaggaagggagccacacgattctaggaacagcatgggagccagtgcagctggaacagaatgagcaggggagagagagaggagatgagattgaatcatatagggcctgttttggaggaggaaaagggcttgtacataaatgtaaaacagtaaaagaaacatgggaggaagaccaagcgtagaactatccagcctcaggactctgagctaaactaagcatgaaaaagaaggtagaaagaaccacgtggaattgtaccagtctgagatgaccaccgtcacattctgacatccttccttcactttctcttccatgagtgcattcattatgtaattgtgatcatactgttgtgacaatgttgcatcctgttttatcactttagatttatcaaaatcattgtctcttgttttccaactctttgtagacctgattttaaacggtggatggatcatcatttgtacaaccgttactctcactgttcaggttcaatgtcagtccagagtttgcactagtgaacatatgactattaaagaaagaaaatgactctggagggtgtgtgtgtgtatgtgtgtgtgatttttttgttttgttttgttttgagacagggtcttactctgtcgcccaggctggagtggagtggtgcgatcacagttcactgcagcctcgaactcctgggctcaagtgatccttcttcctcagcctcccaagtagctgggactgcaggcacgtgccaccatgcccagctaattttttaatttttttgtagagctgagatcttgctatgttgcccaggctggtctcaaacacctgtgctcaagctgtcctcccacctcagccccgcaaagtgctgggattataggtataagctaccgtgcttggtgcctctgttgttttcaatgataaaaacagaatgttctcatggtataaatacgcatacagttgagaatattcaagtgaaatattctggtgctactattcattgttaaatttattctttctctttccagaggtccaactttctctgcctgtgtaaacaattgtatgattatgttctttcacttagtatatcttggaagtccttccatatcagtacatctacagctactttaattaattaattaatttatttatttatttattgagatggagtttcactcttgttgtccaggctggagtgcaatggcgctaccttggctcaccgcaacttccgcctcctgggctcaagcaattctcctgcctcagcctcccgagtagctgggattacaggcatgcgccaccactcctggctaattttgtatttttagtagagacggggtttctccatgttggtcaggctggtatagaactaccaacctcaggtgatccgaccacctcggcctctcaaagtgctgggattacaggtgtgagccaccgtgtccagccttactttgttctttaatgctgatttattcaaatttagtttgagcttattctgtgccaagcacatttcaaggcacttgggatacatcagaggacgagatagaccaagattcctgcccttgtaaagcttgcattctagttaggggagacagatagatagtcaataataaatatacttaaataagtaaatgtcgtgatatagtaatgtatggtgagtgccatattgaaaagatggaacagaccacttcgttgaggtctccggtccaggaggctttgtggaccataaggactctgactcgtatcctgagagagggggagctgttgcagttttgatagaagaatgattcaatctgattcaccgatggctgggttgagaataggcttcacgggagcaagagcagagaagtagggaggacagttaggaagttatttcagtcatccaggtgagaagcgatgtggtgtcagatcacggcgacagctgtggagttagtaagtggtcagattctggataaattttgatagtggaaccgttaggagttcctgacagattggctgtgacattgagagtaaaaaagtaaggataatttcaagctttttggcctgagcaactggaaggttggagttgccatcaacagagaagactgtgggtttgggcacgtttaacagggaagagcatatttcgctatatggatacaacagtatacattgacttttgaatgttctttttcaaggatctccctaatactatgaacgcggcagagataacggacaagctcggcctccattccctccgctacagaaactggcacattcaggctacttgtgccactactggacatgggctttacgaaggcctgaactggctcgccaaccagttccagaaccagaactgatcagaaggatctattctttgtgccttgtggccacatcagctagcctctgctgtgtgcacgtgtacgtgtgtgctgggagtggaggcagctttctcacagtgccttatccatgccataagaaaagcagtgttacattttaagaaacccagtgttaagttttaaacaccaccttccatttcagtagctttgatgatcatttttgcaattgatggagaagtccagagggcttgctggtgctcgaaggccagagcgggcttcatggaggcgagttggagcggggactgagttcagctgttgcaatcctggtctggcgtctggagtcctgttagtctttggcatcctttcgtaaaaaggaaggaattgtcattcttttttttttaaaaccatatttttactgtaccttttcatgtttatttattttttattaaaaaaattttttttgaaacagcctcccactctgtcgcccaagctggagtgcagtggtgcgatctcagctcactgcaacctccgtctctcgggctcaagcaatcctcccacctcagccccctgagtagctgagactatgggtgtgcaccaccacacctggctaatttttgtattttttgtggagacagggtcttgccatgttgcccaggctggtctgtaactcctgagctcaagggatccacccacctcagccttccaaaatgctgggattacaggcatgagccactgcgctaccgagaaatcgtcattctttaccaccactgctgcagctagcagctcactcttcagtgctttaagcaaatgatcctcaggaaagaaaaggtatttgcttattgcaggtgcaaagaggctcagattggaacttttccctgaaactatattgtagcccagagttcctgatgtaagacgctttatttaaagacatccgtgagctttttcactggcatatcaatacttcataacactaggaaggtatccagccttttccttatgctagttccttcccttatttgccagatggggaccctgtggggaggtgacccagtgtgaggccgaagctctttcccagagccccacaggccagtggagggtcgtgtttgtgctctgggcatcaccgtcttgggtctcggtcccctgcgactgcagctgctacatccctccctgctctgagataaatgttcttcccatgaagcagacggttcacttttgggatggcgctgtctccaggtttggctgtctcagtccagatgatgtttggttagtttccattcccagaaccacaagcctttgagttctgaaagtttgtgacagaatcaagaggctaatttgggagatgtgagattcccagcccacctggtattgccctcgagttagtggtaaattttgctatggaaaatatctcttgtcaagaccaagctccggcgcattgcctccctcttttggatggccatggcatctcatgaaccacttggaaatgtgttttatgttgttctccaaatattaataaaaatatcccggagaggaggttcactaagtagcctagagctcgtttgtccagacaattgttggccatattagtacctaagcacttctatttaaactttttcttctttttttttttctttttgagatggagtcttgctctatcaccctggctagagtacagtggcgtgatcttggctcacagcaacctctgcctcccgggttcaagcgattctcctgcctcagcctcctgagtagctgggactataggcgcccgccaccacgcccagctaaattttgtatttttagtagagacagggtttcatcatgttggccaggctggtctttaattcctgacctcaagtgattcacctgcctcggcctcccaaagtgctgggattataggcgtgagccaccacgcctggcctatttaaccttctaaaactactttttcaagaaatatttattcgaattatagaagattggccaggcacagtggctcatgcctgtaatcccagcactttgggaggccaaggtgggagagtcgcttgagcccagagtttgagatcagcctgggcaacatggcaagaacctgtcccaaatttaatataataaattttaaataaaattttaaaaataaaattaaataaaaaattatacaggagggccatgtcaggtgaattttaactgaagcaaaccttatttattcataacaatgaagtttatattactaggaaaaaatttcattccatgataaatgtgtggtatcatgtttttcttcaaaatattgaatttaaagaatgttcattgcaatactggcaactaagtccagatttgctttttaaccatggagtaatttctgagaaatatttgttttattttattttattttattttatttatgttatttatgttatttatgttatgttatgttatgttatgttatgttatgttatgttatgttatgttatttttttgaaacagagtcttgctcttgttgcccaggctggagtgcaatggtgtgatctctgcctcctgggttcaagcgattctcctgcctcaagctcctgagtagctgggattacaggcgccctccaccacgcccggcgaatttttgtatctttagtagagacagggtttcaccacgttggccaggttggtcttgaactcctgacctcatgatccgcctgcctcggcctcccaaagtgttgggattacaggtgtgagccaccgcacccggcctctgagaaatatttagattgtacgcctcaaatgggcagggactgtgtcttacacttttgtatttatgctacagcttacctaatacagtgccaggcctcgttaaacacttattgattgctcagacgataaagaacttgctttggaaggaggagaggatagtcatgtgcttctgaatgtattgaacttcttgaaatctctttcctcatcaattttagcagagtttctattgaaactcctagggtgtgtttatggaagacaaactgagatgtgctgtcccagccttaggccctggcagtacgccttgccttttcacggcacacccactacagcctttcccacactgtgacactggagctggtgagtcaaagtaagtataagtggggagcacttttcagtacagtagttttaaggaaagacttgggtctctgaaagccatgtttgcatccctgccatgtccctcactggctgctagcctcaggccactgactcttagcctctgtatctcggagcctcagtttgcttaactgttaaatggggatactgatacctgcctcatagagttatgaggattaagtgtctcctacctttgaatgtcttgctccggtgtttccctggagatatcttgtccaagtatgaacagcagtgctggccacaaactcatcagcattattattattattattatcattatcattattattattattattattgagacagagtttcactctgtcacccaggctggagtgcagtggcacaatctcagctcactgcaacctctgcctcctgggttcaagcgattctcgtgcctcagctgcccgagtagctgggattacaggcgtgcaccaccacatctggctaatttttgtatgagtagtagagacggggatgcactatgttggccaggctggccttgaactcctgacctcaagcgatctgcccgccttggcctcccaaagtgctgagattacaggcgtgaatcactgcgcctggccacttttaaaacatttctatcaccctgaaaagaaaccctgtaccctttagcagtcactcctcatttcccctgtcctccgcagcactgggcaaccactaaccactgacctacttcctgtctctagatctggtggagatgctttttaaacttttttttactaccctgtggtccctgaggagcattacactgagaagttttctcctattttgtctttcattctccacatcctcttttgttctagtgcatggcatgggaagccctctctaggaggatgctgtggccacacaagtgctggacgaaccgctggagtaggtgacttccaaggtgtcctgatgtagtagctattagacaagctcctgcatttggccagtaattagcatgctgctgcacattgccactaggtggtgctgctgctccattcccaagtaacccacatgcatccctggctggggtcagccttggggtttcccaagtgtagaggaatccatctctgtgcctgtggtaatggctggacaccaggagagacccagaaaacagggatatcctagaagagaaaggcaaaataagcactcagagcagaggacatttgagtgtcaataatgaaggtggcagcagtaatcatggctatcatttactaaaaatagtggatattggccagacatggtggctcacacctgtaatcccagcattttgggagaccaaggtgggtggatcacttgaggtcagcagttcgagaccagcccggccaacatggtgaaactatctactaaaaatacaaaaattagccaggtgtggtggtgcacgcctgtagtcccagctacttgggaggctgaggaaggagaatcacttgaacctgggaggtggaggctgtagtgagctgagatcgcatcactgcactccagcctggacaacagagcaagactgtctcaaaaaaaaaaagtagatactgtgctagtcacttgatacacatcatctctgatctttgcactgagcgaggcatgtgtattatgtctgcattacaaaaggggaaaaattaaggttcaagaagataaagtcaccaggcatggtggcgcatgcctgtgatcgcagcactttaagaggctgagacaggcggattggttgaatccaggagttcaagaccagcctgggcaacatagtgagacctcatctctacaaaaaaaataaaattagctgggtgtggtggtgtgtgcctgtagtcacagctcctcgggaggctgatgtggaaggatcacttgagcccgggagatagaggctgcagtgagatgagactgagccattgcactcagcctaggcaacagagtgagaccctgtctcaaaacaaaacagaaataacaaaaaataaggtgacttgctggaggccacatggctgtgagccaaatacaggtctgggttatcagggctcacatacttctaagtacaccctactgccttggaatctgctgaagaccaagcccctgcccccaagccatggcaaagaaggagggaaggaagcaaaggtgcccagcggggacaactcggggaggggcgaggtgcccagggcccaggaaggccaagcagcatgtggcagggcagcatcaggtgactcccaagaaggaatgaggagaggatatgaggaaagagccacagcacagaggcctgctgttaggtcagcggagaccacggcccatgggacctggatctacccttgatgctaacaatgttctttggggaaaaaatctataatcacaaagtttctgcaactggactgtagtcatggttgcagaactgtatagatttactaggaaccatcaaattgttcacttacaatgggtaaattgtacagtacataggttatccctcagtaaagctgtatgaaatttatagtcatgaaactaatagtgacaaacgagctgggtaagtaggtctcagctgttctgtaggcactttgagaagaggaagagtagcatctcggttttaataaaagaaagcctggcccatggcgtccagcttctgcttgaatactttcagtgcccgggagctcagtatctcaaagcagcccactcctgtttaagagaactctaaaccttagaatgttgaaatacatcattattattctagtactgctgtgaaaaataaatgtctttgttttgccacataacatttctctgagagcttgaggacagttattgcattttcccaagtcatttttatctcagacagaattccctgatgacctgtaggttttttgtttttttgtcttgttttgtgtgtgtgtgtgtgtgtgtgtgtgtgtgtgtgtgtgtgtgtgtgtgtgtgtgttttggagatggagtctctgtcgcccaggctggagtgcggtagcatgatcttggctcactgcagcctccacattccgagttcaagcaattctcctgcctcagcctcccaaatagctgggattacaggcgtgagccgccacacctggctaatttttgtatttttagtagagatggagtttcaccacattggccaggctagtctcgaactcctggtttcaggtgatccgccctcctcggcctcccaaagtgctgaaattacaggtgtgagccattgtacttggctctccttgtgttttttacaggacaagatttccagcctctcccattctcccattctcctggtagctctccaggagctacccctttgatctgtccacatccttcttaaaatgtggggacccatggggaacctgagattctgcagatgccagcccagtgctgtgtggttaacaatttggatcctagcattaagaccccgggttcaaatccttgctccactgtaggccagctgtgtgaccatggttaaaaacatctaccttactgagctctaatgtcatcatctaagttattgtgaggattgtactgacccacactttctatctgcccaatcccttgaggtgggctcaacctgggttggcaatggttgggcaagggagagcgatcaaaacagcaaactgtcacactgctgataagccaagcagagacacagccaccattaggagaaggggctcttccatctctatctatcaggcttttctctcatggagctgtaacccctggtaaaggaggtgaggaacttgctggggggagcacacaaacacctgctgatgtgcctgacttggatacccaggaagttgctggctttctcttcctttccccaacatttttatttgtttgtttgaggcagagtcttgctctgtcacccagcctggagtgcaaaggcgtgatcttggctgagtgcaatggcatgatcttggctcactgcaacctccgcctcctgagttcaagtgattctcctgcctcagcctcctgagtatttgggactacaggcgtgcgccacctcacccggctaatttttgtatatttagtagagatggggttttgtcatgttggccaggctggtctcgaactcctgacctcaggggatccacccgcctcggcctcccaaagggttgggattacaggcatgagccactgcgcctggctggcatttttttttttcaacatagtctcctcttgatctcatcctttgtccactgcacaaacccctccccaaaacgatccccaaggaggggggctcccgaactagatcatcctagggtaggcctacccggttcaatcttagccgggtctatggtgccatctgattgaaatctaacttgactctcttctcactgacctcttcggggtcccaggggtgtaaacatcctgcagccttccgccagccttgtgtcttcaatgttcccctccattcatgactctcctcactgtatttctactaacttactcttacatacaaaacagatctttcccccttcctgtacatcagatatcattttggatcgatactacacccaaggctgggtgtggtggctcatgcctgtaatcccagcactttgggaggccgaggcaggcagattacttgaggtcaggagtttgagaccagcctggccaacatggtgaaaccccatcgctactaaaaatacaaacttagccaggcatggtggcgcgcgcctgtagtcccagctacttgggaggctgagaaatgagaatcacttgaacccaggaggtggaggctacagtgagccaagacttcaccactgcactccagcctgggcaacagaggaagaccttgtctcaaaaaaaaaaaaaaaaagaaaaaagaaaaagaaagcagactacacccccgggtacttacataaatgagatcatttctgtaaacacagcgcagtagcagcatctagtataataagcactcaataaatacgagctattattgctgaggcaatgcatattggggctctttttctccatcctcttgtgtagcctaagtttgcagctgtgtttggcagccgcctcatactaatgaagcacactgggcttgggatcatttcagacctgcagatctcttttgcatgaaatgcaatggggccggggctccctcttctgcatttgtgcacctgcttttaagaacataatgaatgattggcatttgtctcttttcatttcatctaggctttggcccatcatcctaacctgttggcttcattttgaattttggattttgttattgaatgcatcagatctccctccaagctttgcttcctataaatttgatacccatgactcataagtcatcatctgagtcatgataaaaaatactgaataaggctgggcacggtggcttacacctgtaatcccagcactttgggaggccaaggcaggtgatcacttgaggtcaggagttggagaccagcctggccaacatggtgaaaccccatctctacccaaaatacaaaaattagctgggtgtggtggcacccacctgtagtcccagctgcctgggaggctgaggcatgcaaattgcttgactttggaaggtggaggttatactgagctaagatggcaccactgcactccagcctgggtgacagaggaagtctctgtctgtctgtctctctctctctctccatatatatatataaaattagatggggacataccatcagaaacttccctccagcttgattcatttgtgtaacagtaacagatatttactaagcacctataatgtgctctgtagtggacactgttccattcattagatgtggatgttcagccatctatgtaacttggctaatcatactttaaatctagcccttatttctccatcttatccaccaggaatcctgaaagattctatcaagtgctttgctaaaattaagtatacaatatgcgtagcaatgccttcatgtaccaatccctcagcaatggaaataaggttaatttgactaattactcctagtaagccgctttgaccactggtaacatctgccatcttttataagcctatctgattgcagatcaacctcagacatacccatctgtagtttctggaatccaccttctctctctcacaaacctgggcgacatttgctcatctctaatttttctccacccttctcagcttcctgacttctcaatatttacagtaggagtttgcaatcacacagtaaaggtcttggatatatttagttggagttaagagcgttgggctcccataaagcagtagggctctccttgagtttagtttatatatatttagttggagttaagagtgttgggctcccataaagcggaagggttctccttgagtgctgcatcatctgtcttagatcccgatttccccataatcatgtttattatcctttccaggttgaagattattctctcttctaaagaaaatagaagaatattaggagaaaagacacttgaaaatgttcactcttttattcacattacatcatctgtcttgaataatgggtctatctctttcctgttgctctggccctgaaaaaaaaattagctttttaaggctgcttttgttacgtgtgcattttcttgtaatcccgtcattctgggatttaataataatagtattaataccacctaccatttgttggttacttactgtgttttaggcactgtgctaaacgccttccatgtattcatctcattagtaaacatttctgaaactattcttacaatttgtcttttagtttttcttgttcttgtcctcttaaaatctgagcttagccatgagctctcagtgaagctgcttgtatttctttaaaaaccctctttgcttcctccaagtggagtgggttgtacttctgaggtcaggacaaactgggcaccggaggagttcagccttccgaggctgcaggaggggtgggtcccctgaggcgagcaagatgatgtaaggccttgacttggggtaacagacagccacagatgggaagagagaagccaacatttaaccacggaaggatgtgaagggcggagaggtgggttgagcactgggccccgggtgcggggagtgggaaaaggtccaaaggtgaaacctgggaagcctgggcttgggtctggaagtggagagaaggaagtcgttccagggggagctgtgagcaatgtgaacccatcatttctgttttcaccagcgagggtgagaattgagtccacaggagtggctccctcctctgcttcctcgacctgcagagggctaagtggggcaacgagcagggtaaaacttttcaagatgctctgctcttagcagaatgagctgttctgaccatttcccaagagccaaatttcctcatcagtcctgaatgttgcctctgtgctatgatttgcgttaaaaaaaagatacagtctccccactgtgttgtcaaatctgaaataagggactgtgtttttgcaaaattctcttccaaggccaagcacagggtcaatgttcagcaaatatttggtgagttaatgaatgaaatgaaagcactctccttatgctccttggctgagtgatgtggagaagagttccagaacaatataatttagtttctttctccttttaaccgagcctagaaattctccacaaggcatatgcaaataccccagacatgtatttttccaggcgtgtgttttatgtgcaaatactcctgcatatgtatgattttattttactttttgagacaaggttcattgtccaggcattgtctaatgcaccagtgcattggtgccatctcggctcactgcaggcttgactttccgagctcaggtggtcctcccacctcagcctcccaagtagctgggatgacaggtgcacaccaccatgcccagctaattttttgtatttttagtagaggtggggtttcactatgttgtccaggctggtcttgaactcctgggctctagcaatctgcccaccttggcctcctaaagtgctgggattacaggcatgagcttctgctcatatacgttacttgttcatctgactgaagaccccaaaagagaccagcaccccaaagaagcatgtatttctctttggaaccagaagcaaacatccttctgtttgcttgggatgcatgggatgagcatgcagtaggtgtttaataaatacttgttgactaattagggggcataaatatgtaaaagtggtaaattagcaagaaagagctgcagtgtagataatcaaataacaaagttgtctaggacaagagaatctatctctgagggctctgtgtaggaggagaggtggtgttggctagtgaggcagatctgccttctaattaggctccaatcaggatagtattgcaattagctcgggatattatagcagttagcttctattcttggaacaaattcctgggagatttaagttgggtggtaaaagaaggttgtcccaggaataaatttgctgtgaaccgctttggagtgactacttcatatgtgcctaattgaaccgccaatgtaaacctgattggattgtttccttctttatcagcgacacttaaacatgagctcaggaatttggacagccacttaacaacagaacacagctcgggaaattgcagatttcaaatttcagaaaagtcgatgaatttagacaacttgagtgtcttctttgtgttagggtagacaggctttggcctccaagatctggctgacaagtgcttgctgctgagacaggcactgaaaagagtaaaaaatataatgtcttcaattatcttcccagttattgagacacttaaaaactccaccccagcccaccctgacagtctcctgtaaggagctcagttttctctgtgtcaacctgatgacagacccaggaggatgttgtgtctgggaatgtttgctcttcctggctggggtgagtagggcttggcagcagagacagtgcgaacagaaccaagccacgaatcctggctctcagtccatccagccagcagcttttcgcttcatccttcaccctccacacttcttctctttcttctgcatcaggagaggcagatgtagagcccagagttttttgtcaaagagcctgagttggaatcctgcctggcaccatcgctggggggtgactggctttctgaggcccagtttcgtcatctgtaaaatgggcatgataatatctgcccaaatcatttcaggaggttggttgttgagaagaggtggtgcctgtacgactgccctaagcttgaaaggacagcaatcggtgccggctttgtagctcacaaactttaccttaaatgctgaccatcacagggtcttgggacaggccctaggaccagcccccccacccttgctggtgcagggcttccctgcagatggcgctgtgcctggagaatgcagccagcagtaaatcagggcagcttgattaaacatgtccaagtctagtcaagccagactagatgtgggcgtgtttggcactataggtggatccagtctggatttcctttacctgcatgtcctgggtgtgtatccctcacaaaagttccccccgccatcacattcacacctcaccaaattaagccacccagcccccacttggccccctaggaaccactgcagcaggcagtgtgtttaatccctgtgaagcattttagcattagatgaagatgacgccttgggctcccatccgcctgtgacagaggctgccagctccactcttggaaacacccttgttttgacttagtttcccatccaagatgaaggtaggcagactgaaaaagccaatgctaaaagaaagaagaccccaagacccctgtatgaagcttagaaggcaaaggcctgtcttcacagagccagctaaagagctaggctttggcgccaccacatcctgtttggaatccaagctccaccgtttagcatttgtgtgaccaggggcttgttaaggaaggccccaaggctcccttccctgcgtataaaaagaagagatggtacctgctttataggatgcagtggtgagggttcaatgagaagaggcttgcaataggcttggtatagtgcctggcacatggggatattcaaatagtgctgactattagatcaggagcagacattggggtaggaggtatcagcccggggaggagacgacaaggagagttagggagggaaggacgtgccagggaagagacggtgggctctgcagaggaaggcttcttggtacctctcgaaagctgctgtgggaacacacctttactctgctgacattttcagacagccgtgctggcagggatctgggcacctggcaaagcgagctgaccatctggccggctgtttctgcaacaaaaagagatggtgtcaaaggttttgggagctgggctcctttgacccacagttggcaccggaggccaaataagtcctcctggagaccatcaccttctcatcagcaatcttccagccagcacactgcagcggccagggagtgcaggattgtctccaggaagccagtgccaaggccagaggcccagagcctgcactgagcaaatcgccagggagtagtgacagcccttccttcctggtcagtgctcttgtcccatggggctactatctcctctggatcctatgaagactgctccctgccacggccatgattacgtgtcacactgcatggttagaagggcaggttctgaggccaggctgcctgggttcatgcattagctgtgtggccttgggcaagttacttagccacattttgcctcagttttctggactacaaaatggagttgtgagagttcaccaagttcatgcttataaggagatggcagcagtgcctggcatttaaaaagtgccccacaggtgttatctggggctgttgtcatctctgtggccaattgtgcatcggttccaggtcttggggtcatgtctgtgtgcttggtgccctaggtgccccaatatctagtctctttttctcccattaaaaaatcaatctcacttctctgtctccctatctttctccctttcatcttccctttcttagcacattatttattcaacaaacacggatgaagtgcctgccctgtgccaggcgctggggagggggaggatggggggctacagagatggaataaacagtgagccctgcacaggaccctccgagtgcccacagctaggcagaacagcagttagtccatgctgatgcaggattcatcatcgtcacgggggagccagaatctggagacacccaggccctgaagacggagcctgcccagcccccaccgaaaagagagctgctattggcctcagcgtccaggaagagccgggtgattcagcgggatggagatcctccttcccaagacaagatgggggcagcagaggtgagattctggctgggagtgaatgggtctgctggctgacagcttggctgtcacattcgaaagcttatccgtggacagtgcccctctgccctgctaatgacagggatgtcactcacaggtctcccctggattgtgcagaaccagacattgctgcctttgcctaggcagggtaatagatatcatgagggcttgggaagcttcggggggaaagttaggctatctgcccacccctcaatcatgccacgcatccccagagtcacacagaaatgttcttacacacctctgtgccttggcatggctgctccctctgcccagcctgccctcccctggatcgggccttctccatctgagcgtcccacatgtccccaagcctcagtccccaggaagctctgggagcctgcagtgctccaggatcacgggagtccctacctcccaccagtggccctgatgccttggacatgcttttactaccacactgtcacactgggtggtcattatttgtttaggtgtctgttctccttaccctagaccttgagttcttgaggccaagaacagccaagtctcagctttctctgcaggaccgagcacatagtggcactccgcaaatgcgtgctgaggaatggattgtcattactgatgtcatcatccacccctgcacaagtcttgacacggagcagcctcccacccctgctggaagcctggcttaaagtgaccaacctgctttagtgaagggttggggtttggaaggcccgctggatacaaggatctagaatgaggaggtcttttcctattgaggaccaaagctctcaactcttttttcctaataaactaggagagaccagtttggaattgtctctaaatgtacaggatgagtttgagtttaggggtagcggagcctcttgttcccaactgaaggcactcacgaaacctgaactgcacccacttggaggaaagtgagacggggcttcccagtgagaacccagggagatgcgtcaaaggctacagagggaacaaacaaacaagcaatttagtttagattttttaatgcagaaatgaagtgttccgcttgtttgcttttaaaatggagaacagagaacataaaatgacttcacaaatgaaggaagtaattagaaaaaattcctccagttctatgtgatggccagtaaaggaagagagagcacagaaaagatagaacgggaagggcagatgggaaggaaggagagtacgacacagagatgatgacgcaaagagagagagtgaagaagagatgaacatggaaccatccctccacacacacacattttgatcttatggaaaacctgctttgtaaaattaaagtttgtcttttgttgtttttacactgtaagagagcgatttgaatacatttattgttttctgacttctagaataagaagttgccagggagaagtccaatgccattcttagtcttgatctttttttataatcttttattttgctctgtggaaaattttaagtgtttttttttttttgagatggagtctcactctgtcacccaggctggagtccagtggtgcgatctctgctgactgcaacttccgcctctcaggttcaagcaattcttgtgcctcagcctcccaagtagctgggattacaggcatgtgccaccacggccagctaatttttgtatttttaacagagatggggtttcaccatgttggccaggctggttttgaactcctgacctcaagtgttccgcttgccttggcctcccaaactgctaggattacaggcgtaagccactatgcctggcctaaattttaagattttaccttcatatacatcactatgaaattagcgtgggccttttttcattcattgtattgggtgcacaatgggctcgtaaactctgcagatgcaggtcattcagtcctaggaagtgattttgtattatttctttgataatggactctcctccatttcttctactccctattccttttgctgggcctcctagatggatcttctgcttttctattttctctctgattttccatacctttattttttttcctcttccaggtagatttccttgaccttatcttccaaatcttctactgactattttatttatgggatcaaattttcagtactttgcactgtttttctgattattcttttttttaaaaaaagttttattggaggtacactttacatactctaaaattcactcattttaagtgtctaattcaatgatttttagtaaatttacagaggtctgtaaccatcaccacaatccagtttaaattattcttttgtgtatagttgtttgttttggtatcatgggtgaaatgtctcctcttatctttgtgtgtgtgtgtgtgtgtgtgtgtgtatgtgtatgtgtgagacggagtctcactctgttgcccaggctggagtgcagtggcgcaaccttggctcactgcaacctccacctcccaggttcaagcacttctcctgcctcagcctcccaagtagctaggattacaggtgcccgtggctacgctcgactaattttttgtattagtagagatgaggtttcaccatgttggccaggctggtctcgaactcctgacctcaagtgatccacccacctcagcctcccaaagtgctggtattataggcatgagccactgtgcccggccatcctccacctgttacaatgcagccaaaaggccctcactaaatgctgtcccctaatttcagacttcccagcctctggaactgtgaaccaaataaacttctattgtttataaattacccaacccctggcattctgttataacagcaaaaaatggaccaagacaaggtgatatctatccttgcagatccctaaaaaaagagttcctgggagttgatggatctttaatacctgcttgagggacaaaccagatactcttttgagagcccatctaattctgggattctaccctcaagtgggtcgaggggctcagagtttgcaaagctagagagcatcaggaccagggacagatccaggttttgtgaaacctgaagcttatacaattttcggtgctttgtataagaaaaataatgcaaaattatggatgtcaaattagatacggggcctaggaaggggctcgtaaactctgcagtagtgggccttaagcataagcttattagcctcccaataaagcctcctctgtctaggacagaaccatattcctttggagccagtagatgtcaatgtgttttcccccaacagacttggtcttccagattctacatctccctcatgatttcccccaccccccaaatttctaactcagcaaaagcttattgaatgcccactgtgtgcaaggcattgggttgggccacttcattacttgcctctgtggcaggactgagattatcacccacccagggagaagcacatctgactcaagatgcccctgagtctgtgcaggtaccatcaaggcagaggaagagtaggatgggcacagaaaaccagatgggaagcagggccacatctgatctaaggacacaggtggtctcctgaggacatcaggcccctgtgctcagaggagaaatccatgctgccctctgtctcacttctaaaaggaattgttgccgcagaaactgcacagagacgtcagaaacctgagttggagtggaaggctcagctgtcttcctgctgcccctttgtcagacacatcacccctcttgtgggactggagtcaaatgtcatcactcagagtcagcagccctgcacttggtctggagccccgctgccagccctgtccccacagttgtccccggccctgtctgggcctttttgagctgattgaactacagcatctagaaaactccaggccaattctaggttctgtctacaatctctgagtgttttcttttctcttggaatgtttaaccagcagaaaagcacacgccagcagtggtttctgaggccctcttcaccttgccagatgaccaggccttgccagggacccactgggtctctgtcatctccccgagcctttttcctcatctgtaaaactgagacgagaacccctatgaagggctagttttatgactgtggtcaaggtcaacctgggtctgggtgtgggaaggggttactgatatctcacagtctatcttctggtctagctgcacaggtgatagccacaggtccccaccagttagatgtagtgttggagataatcaggcaggtcagggccctcggatgccccaaatttgctttatggtttatgacattctcccttggtttgtactgacaatgctggctgggaaggaataaaaacagccaaacttcttaaggtgatttgccagagaatttttatttggatacacactgtactgaacacagacctgaaaatgcattttaaaaggctttctaatgaagcgaatacaaaacaactcacacattagacaaacctctgtggtatagccatactggggagagcagaggctttctcagagaaggtgggccaaggaagaggtgggggagatgtgaggatggcccaagaaggtttagggagggatggtttgggctcccctctgaagttcactgtgacccctatgtccacccagagagctcagtgccctatctctgttatttatactagttgcttcccaagcttcctgggcttttctctaatttggggtgcaatttagaggccccactgatgaactttaaaatccattgatattgggccaggtgtggtagctcacacctgtaacctcagcactttggcaggcaaaggtgggaggattgcttgaggctaagagttcaagaccagcctgggcaacatagtgagacccccatctctacaaaaatttttaaaataaattagccaggcatagtggcctgagcctgtagtcccagctacttgagaggctgaggcaggaggatcgattgagcccaggaatttgaggctacagtgagccaagattatgctactgcactccagcctgggcaacagagggagaacctgtctcaagaaaagaaaatccgttgatattatatgcaaaactttatgggtgtgaaaaaaatcttacgtggccgggtttagaattcttttctgggaagggggcctgagcttttacctgctctccagtgggttcagcacccaccatggaaaccatcatggtagaccatgctaaggcaggaaaaggtgggccagcacatgattccagcagggccactgcaagagtggggaatgcagaccacctccagtttcggggtgggctgggtacccaaaggaagatggagactcaagccccaggatgtcgtttccctcacaaggtccatccccatgctacctggacagtagtcaagacccttctacggatgatcccattcaaagcacctgtttggcacccctgatgaacctggcacttgtggggaacatgaggaaggtcagacatgacccttgtcagcctgtatggcgctcctagtctagggggctggggaaacaggcacccagagaaattacagggtgctgtggagtgtgctacacatgaaggtaaaataaccgggcagcacggagggaaaagttagctcagctcattcgggaagctggaagccacccatggaccttagagtgaaacaccagccacccatgggccttagcatgaaacaccaggctgtgtgacttctgaggacctcagtttccttattagtaccatatggcagtaactatttatggagttgggagagtcacatgaagtcatgtccacacagtgcatccatggattggaccttcaagcggaatttgccttgtggaaagatctagaaggacaccaaaagcagcaagggcaacatggatagaggcatggctcggcagggcactttgtgccgactcagcgatgggtccatgctgtgacttggagagactcacttttgatggtccagcagcgttcaggttcaatgactcagtaattcttgattcaatgatgtggtcatttgaagatttgtgggtaccggcgattaagtaagcagagtgtttataaatctaggctgctgataatcataataataatcgctgctaaaaaatgattgagagcttactatgtgccaggctgcgcacagcatttatggattaactcacggaatcattaggtcacgctaatggaagggacttgggtaatccctttgccaaggagccacctgtcacctttagtttcagtttattcctccccctcccattcttactcaggcctccccacccttacctccccataagtcatgaccctctcctaaaagtcctagaagttcagagccagaagggacttggaagatccctagtccagttcctttttatttttattttttttgagacaggtctcactctcctgtccaggctggagtgcagtgatggggtgatcacagctcactgaagccttgacctcctgggcccaagtgatcctcccaccttagccttccaagtagctgggactacagttgcatgccaccacacccagctatttttttttatttttatagagacagggtctcactatgtttcccaggctggtctcaaattcctgggctcaagcaatcctcccgccatggcctcccaaagtgctgggattacaggcatgagccaccacacctggcctcagctcctcattttatacaggaggaaattaagcccacaaaaggaagggacttgcttttctagagtacagagaaagggcctctgagcacctgtgtaggtgcttggtgaatccagccaggaggcctgattatccttcattgactatccatgtgatcttgggtgaggttcagagtaacagtcaagccagtgctcagctgggtgtgtccacacctccctggtactcacatgcactccgctcttcttctggctgtcaagtccctagatgacccaggccacctcgttttccctcaggtcaagcagctgaggtgggggttcaggcctctccagggctgtagctcaggcctcaggaggtgcaggagacacctgggaggttcagagaggcacagtaactttagatgtgtgcaggtggccagaaatagccactgagcagttctatggccctgcccaggccagtaccgtggccagcctgggaagctaaatcttcaagactagcttagttaggattgcagtctggtttccccaaatccttcaaacccagagccatcccaggctggagtgcagtagcataatcatagtagcctgagctgtcttcctctgtctaatcccttgactgtattccaatgtcttcaaccctgagatagacttactgatacccctgaacttgtaccttctccccttctctgtccctcacgcctgcctggccccatcacggtcctttgcccttcccagttgagcctcagctcttgcctggcttcacaggggtctcctccctgacgcctgttctcacttcacagccacctgtaagtcgaccctgccttaatcttccaccagcagaatttgtgtgggaaaatagacataacataaaatttaccatttacctttttaatcatttttttgtttgtttttgttttttgttttgtttttgagactgagtctcactctgctgcccgggctggagtgcagtggcacaattttggctcactgcaacctctgcctcctgggtttaagtcattctcctgcctcagcctcccgaggagctgggaatacaggcatgcgccaccatacccggctaatttttgtatttttagtagagacggggttttgtcatgttggctaggctggtctcgaaccctgacctgaagcaatccttctgcctcagcctcccaaagtgctgggattacaggcgtaagccaccgcacatggcccattttaatcatttttaaggggataatttaggggcatcaatcacattcaggatgttgtacaatcatcaccactatctatttctaaaactttttcattgccccaaacagaaactctgaaccaattaagcaacatctccacatcccccacaccacccaacccctagtaacctctaatcaatgtttctgtcctgctaatttgcctattctaggtacctcatataagtgaaatatttgtccctctatatttggcttctttcacttagcacaatgtcaaggttcatccatgttgtagcatgtgtcagaacatcattcctttttatggctgaataatattccattgtctatatacactttgtttatccattcatttactgataacactgggtagtttccatcttttgactatcatgaataatgctgctgtgaatatttgtgtacaagtatcttgtttgagttcctgctttctttctttttttttttttttctgagacagagtcttgctgttgtcaccaaggctggagtgcagtggcaagatctcagctgacagcaacctctgcctcccagcttcaagcaattctcctgcctcggcctcccaggtagctgggattatgggcatttgccactatgcctggcttacgcctggctaattttggtatttttagtagagatggggtttcaccatgttagtcaggctggtctcaaactcctgacctcaggtgatccacctgcctcggtctcccaaagtgctgggattacaggcatgagccaccgcgcccagtcttgggttcctgctttcgattcctttgggtacatacctaggagtggaatggctggatcaaatgataattctatgtttagctttttaaggaaccaccaaactgctttccccagtgagagcaccattttacattctcaccagcaacatgtatgggttctgatttctccatcctgaacaactcttgttatttttgaaacaggtttctttccttttctttctttcttgttgttgttgagaaggagtttcgctcttgttgcccaggctggagtgcaatggcacgatctccactcctcacaacctctgcctccctggttcaagcgattctcctgcctcggcctcccgagtagctgggggattacaggcatgcgccaccatgcccggctaattttgtatttttattagagacggggtttctccatgttggtcaggttggtcttgaactcccgacctcaggtaatttgcctgtctcagcctcccaaagtgctgggattacaggcatgagccacggcacccagccgaaacaggtttcttattctttctagcaacagccccctctgggtcatcttcaggaggtttctgttctctttagaactcgacctcaaatggtcccatcacatcccaagtctccttagcccaactgctgctgcagtagcccaggaagtggggtgctgagatgaaggtccacatcagcaggtctagggtggggccctggaactggcatttctaacaactttccagcaggtgctgatgctgctggtctggggatcactggagaaccaaggcttgaaggcatcacattttatattttgctctaggaggtttctgcttagttctttcccttccacatttgcataaaacagaagccccgcaactcaagatcttgttaggctccggggaggaagacagggaagggattcctttccttcctcaattcccagactctctgtcctgctccgtctggaatatgagtgtcccctgttctgtctctgcaaacaagtcagggcctttgctggggccaacagcggcacaagaattaaagttccaagttagctttggatcagcttcaatcgacttttcactctggagctgttctaggtgaggcattggcattttattcagtgtgttaaatggctgacaggcgttgagtctggtgaaagattgccctgaaatacctcccccaaggcctggtgtgggaaaaaaacaatgaaagcctggcctctcctctggagcagagagcctttcatccaggccccagagccgtccactgaagctctgtccaaggtagccagtcacagggtcctctgcttcagagctcccaactctggctccctctgacccgcccctttctctttcccccaaactctagctttggagacctttgcctactgttggcctctggttttggcaaacagtttccaacatctcagatttccccattttgcatacaaatcacttcccttctgtgggcctcagtttccccattgttcaaattaaagaaacgacgagagcaatgattttgtaaccatgttccacagagctcgaggattcgctgaaggccaaggtataccccgagttcgccacctctgctttattagagtggcctcgtttgtatttgatatctgaaagttctatgtaaacatctcatttggaagacaaagttctgctgggaaaaagtagtttgaaaatcaacagccgagatgatcttgaacattttcccctctggtttcatcttctatattctatagttctttgaccattacatcttttccaagtcccagcctgcatgtgacaccagtcttgaattttccttgagcttctggaactcaatgctcaggaacacgtgtttcttccatgacagggatagggcagtggccggctggctgagtggtgactgctgcagccctctggccagtctaggagggcatggcacctcaagcaaggtggagtggggctgagtaggggaaggaggttgcagtggtcactacgagccttcccgggtgtgtttgtgtgtgtgttttccacttggaagacgccactcgcgaaggagtaggaacccgtttcacagttcccgtgacagtcctgtgtgaaacaccagtgaactcccaggcccagtggagggtgagaagggaggtcaagtgggagccacccacaaggatgttttctggctatcaaattggcctcatgggcctgaagttgacacgcatcagcacgatgaatgagcctgtaatacctgatcatcaggacagaagcaagcgtacctgggatgcttctctgggagccagaagggtggtaggaagagggtaaaatatgctgagttgaaatagctgaggctgtttcttctggagaagagcaggcagaaggctagggtgggtagatgggggactatctatttatcaggctcaggtacacgtatccttattgcaggaaatgtgatgtacaggcttctggatttatggtgagggagaggcaggactctaaatcattttgcagaccctgaagccctgactggaggcttctcaggctggaatacattacgtggtgggagctcctccagtgatgcaccatcaattgtggcaccgtggctactccagaggcactggaaatattcaaagggaggaaggaagatgggaactgtgcaatggcattgtatgtgtaaagggagtgcccaggcgcctggggtgagggtgaagctcccactggagttcccatagttctagctgtgctctggcacttagctctgtaaatctgcccaaagaccctgacaatggagtagaaagggctttgcagtcagacgaatttgggcttgaatcctagctctaccgattggcagctagatgaccttgagcaacttatttgaaaactcctaaatctgtttccttagctgtaaagtaggaataatacccaaggatgtcactgtttgtttttcatccacaagccaatctccctttctcctttgattttgtttagatgaaacattagggaagaagggcctctcctgcagcttcagcaagataaactgcaattggtcggatctaagcataatcatgtcattttcttttagctattgattggtttaggagagggcatgtgacctaattttaaccaatgagatttttctttctgattatgtcaaagagtcctactgtcatcttcctaccataatgtggttgggtgaggatgtgatgcttggagctgtggcagccattctgcaaccatgaggtgataagcctaagaaagaaaagaaaacacagcaaggatggtgatgcagaaaaatagaaagaagctgggtccttgagcattttgctgagctgtggaactgtaataggttcattgctcaatgtgcgaggcaagtcaatatgctgagacactaggttgcagcagagaaagaagtttaatcatagggttgctggatgaagagaagggaaggaacttcaaatttatctccctgaggagtttggggctagggtttttaaaggattttggagtgggccaaactgtggagatcattgattggctgaagagtacagggtgaagtcatgggacagggagatgaagaagctgaattctcttactgatcccattcctctgtgaaaaacatccgaagtgatccttaaacaaaagccttatgatttttttttggaggggctgttaacagctttattgagacatatactacacataccatacaattcacccacttaaagtattcctagtatcttcacagagttgtgcaaacttcactacaaccaattttagaatattttcttcacctcaaaaagaaactctctatgcttttgctatcactccccaaccccctacatccccaagctttaagcaactattaatccactttttctctctatggatatacctattttgggcatttcacataaggaatctaatatatagtatttatgactggcttcttttacttagcataatgttttcaaggtttatccatgttatagtgtgtatcactactttattcatttttatggctgaatattatttcattgtatggatacgctacataaaattttaggattcggccaggcgcggtggctcacacctgtaatcacagcactttgggaagctgaggggggtggctcatttgatgtcaggagtgtgagaccagcctggccaacatggtgaaaccccgtctctactaaaaatacaaaaattagccaggtgtggtggggggcgcctgtaatcacagctacttgggacactgagtcagaagaattgcttgaactcgggaggtggaggttgcagtgaaccgagattgtgccactgcactccagcatggcgacaagagtgaaactctgtctcaaaaaaaaaaaaaaaaaaaaaaaaaagctttaggattctgatgtcagagaccctgtctgtaggagcaatggggatgcaaacagtcaggatctagcactacccgacctttagcaacaaggaaatgggccaaagtgcagcctgattagtgctgaattctaactatatttctgtccagaacctggcatgcaacccttgtcaaccctctgggggcagtgtcagttgctgcatggactctgggattgtgtgtgtctccagacttcttatctgagagtgaagaatctttattccatatgacattggcaattgggtattccattacctgcacctaaagcattcctccctgtagtacagcaatctcacagggttgttgtgagcattaaataagataacaaatatgcaaaaattccaagcctagaacttggtttagtgtaggtgttcaatacatgctaatttcttccctctcctctattttaatctcttaactttagattttttttctactctaccaatctcacaagattgtgctaaaaaacaaatgagatcattgttatttattgccacaataatgctgtataacaaatagccacaaaacctgagtggcataccacaataaacatttctttagcccacaaacgggagacactgttaacttgggtaacaaaggggcggatgcacaggcctgtgaatctactaaaagccattgaattaaatgggtgaattttatggtatgtgaattacatctcaacaaagcagctaaaaagaaaaaaggaggatgattgcagagtagggagaggagggaagaattactaggtggtggtgataccatccatttcctataaggctgctggggccccaccatgcaggaccattcacaaccctgcttgttaaggttttctctgccatccttgaaaataatcactggttgcataacggacgctgtggggaaagattctgctgacagcaattcactctgtggctgactttgctggagcacaagcccccctatcccacaggcccagacaggagctgggatctcagtgcatacaaggaagtagaggcaccagatgagagatgggagcatcatcccagggctgcctccttggccagaaggtggcattaagggcttctgtcctgctgtgtatttggagaggcagaggcatgtgggaaagggagaaaacgttagcgtgtaacagcgacgaaggggctggagcatgggacctacagggaaggatgaaatgaaccggggttatgagctagagaagagcagcaggaggggcagcttcacaactatcttcaggaaacagttgggttattaacccctgcaaggggttattaacccctgtattaacccctgcgagggggccatgacaggctgctctccagtctctttgaacttgagtctgtaggaagcaaagttgctttcacaggaaactggcaactgcctgcagcatctgagcaagtgcataggtccctggtccatgtggacatgaggttcccccttcctgtggaacattcccacccccactgaaaagcagccacagacagcatgtaaatgaatgggcacggctgtgttctaataacactttatttataaaaacaggcccagtgagtgtagactcctggagaaagacagaactgggagggcctcagagaccagtgatttctagtcctgcccgcatagtaaagtcacctgagaaactttcaaacactactcatatctgggccccatgtagaaagtcaatttcgtcaactttctgggggccagacctgagcatgggcatttattcaagttccccaggtggttctgacatgcagtctggggttaagagccactgccccaatccaactgcatcattttatacatcaggaaaccgaagcccggagacagccagcaggtctacgttcttacagtcagtctgatttaagggactcctccaaagcggcaaagtgccatttgggtcagatctctgacctgagctgcctctcggggctgtcatctttctctcctcctgacaggtggattttcccatgtaaactttagatcggctgatctaggaactaaaatgaaaatggggcaccctgagggcccactggggaacagagtttgggagggaacatggagggcagttttttgtaaaggtaggttttagagagaaacaactcaatttactagctttgtgtgacatgggcaggttacctaatccaagactttgtttctccatttatagaatagggctgatcataatgtctgccttgtgagggtgttgtaaggattagaagggattatccatgtaaaatgtttagcattgttcctggcacacaaccagtgctaataaacagcagcatttacaagtatttttattttatcttggtattagatccattgctgtgggtgcacttagcaaagtcagaagcaggaatccagctggaaggtagagggcagtccaggcatgggcaatggccaaagaaaggccatgaggtgggggtgagcaagctgtgatgagacccagctctggggacccattcaaatgtcaccaaacctgcctgtgtccagactgccacctggaacctgctcctcctctcccccagctcctgagcttctgttccgctgtggtcagggtctttactgcaccctgctggattggggaaactgcccctggtgagggcaggtgtgccctgtgtgttggtagcctccaaggggccttgtaccttgtgtggcacacaataggcgtagccagtcaggctgaaaaggaagcagcttctaataaacattaaaataagagaggcacagcagggaaaagccgtggcaggatggccaaggagcttctgtttgatgccatggatgggaagcaagaagctgtacttggctggagctccccacatacccctaagggatcccgtgctgctctgacccagggccatttgctctgggaagagagtgccttggtcctgggctgggacaggaagtcttccctgaccatcactgtcacatccttccatgtgctctgcctgtggcagcccctcctccagaacttgcaatccaccccgtcctcactactaaggccgggcccaaggtgtctgagcccaccgcagccaccctacctgacacctgggcagccttcccatagaccagggagcgggggaggagggaacagaccagtgggcctggaaggggactggatagttgatttggggtccacccaattaggctccaggtgactgtaactgcattcagaatcctgatgccaccccacccagctgtactaacatagcagcttcatgttcacaggtgctttactatgacttgcctcactccagcttctcaagccatgctcttaacctctgattcctttctcagggttcagagctctttttcaggtgggtcacgtgggggaaaaggttgatttttcagctggtgctgatgtgccctagcctaccatgcctgactgaccccattgagataaaggggacagaagaccccctgtctcctggctccccaagacttgcctggagattggggtgtcatggggaatggcacagagagcacactaggtgttttttctccaggcttgcaaacccagcctgaggaggcaccccattatcttagcttcagggattgtccttctcctccaaggaccctctccctgggccagtgtcccttcctccttagtcccaccagggtggggaggctgcagaatccatctggagacagagagcgtgggattgatgtgctgtttttagttccgtgggagaactcacaacaaggggttgtaatttctctgcaatttccctccttgatgaggcatctgttggcatgctgtgaggaaattctcattggagcagacagggcacgtctatggagccacttgcatgggtgtgacaaggcctcatcactgtttctgcctctcagaggtcctgggctttgctctgaatcagaggagctctgaatctggggcccatcctccttctctacctctgtcctcctcctctaccaccttctctgcctccctctctggctgactcacgtgtggcctccagctgtctctgccatgggtggcacctgcctgtgcctcggtcacctcttgtttcttgcactgtccgagcctgatggtcccctcaatggtgacctctgagctccagcacatccacaagctcagctgatactttcacccataccatgtcctggagctccagggatgaacagggagccccctctccacccactcaccctcaggtagctgagtgcgtgggtgggagggaaggcaagacactaacgtgagatgcctgtgcttatggtacaatgcacagtggagtttgggagctcaaagagggaaaccctcatctcttggaagcacagtgattggcagagctggaggtcagacaattggagttttgccccaggccagccaaatacacaggctatgacatttgggggaaatgattagatgtgtgatggggaatgttacacttacaggataggacatgctctcccatgcagcaagtacttggcaggaatggttatttacaataggaagctcccaggcagtgcacataatactatcctgctcctcactgtctccccagccacaaccaggcactcccaagctgatgtgaggacacctttatcatccttgtcctgggcatcaaggttgccagttatagttctggtggctcagggtgcaccagggagcaggtgatgctttgcctgagtcttgacgggtgggcaggggtttgccaggccggtgaggggatggagtgcagggagttccaggtaggagatggaggtgggcatcatattcggaagaatatacatggtttgacctggcgagggcttgagggtaaaagggcaggagatgtcctcaaatgctgggtggagccaaaccctgaaggccttgaatgtcacactgagaggtcatggcttttcacctccaggcctttgctcatcatagactgtgccccctcaggagcaggacaagcaaggtgcaaaatttacggagacactcactctcagccgcaccagtgcacgccggcacctgataatgactgcctccttactttgcatcctaggtccccttcctaggtcaccctacacacagccctgcttaggagggaggtcactttctattcatctttgagcgtggggcctgaaacagtgcccaaccagagtagaagagcaagaaatgcatatagaattaatgaacaaatgaatgaacaaatgttgttctctctgtctggaacatgtttaccttcctcttggccagtcaaggtgtgtcatttttttttttttcagcttacctcttccctgcagcccctccaggcaatgctgtcctgagtcctcagctcttatgttgtatatatgtcctatttcccagctgggtggtgttcttctgtctggaaaaggacatagacacggcaggtgccctgtaacatctgggcatcattgaatgtatcccaggcccttgggtgggaaatagccactgctgctgctgctgctgctgtgagttttggtttccctccctccacttccttccctctccttcatggggctagactcagagaaggctcctggaggtggttgctccaaactgcccctccatagatacaacgcatttgctcagttcgagttcctgattccccgctttggatggctcccagccagctgatgctcatgcagtctggaaggctccagaggtcttctgatttgcccacaccccccatcctctggatggcactcctcatcaggtatgaaacccatggggtcttggctaaaaaaacgaggttaaacacaaccactcctgggctgcagaaactccgcggataatcaatgatgttccccagaaggggtcaagacattcacatttttttgtccagtagagaatctgtttcaatcaggaagctactcttgctgtccagaaaagtgggtcagtcccctcccatgctcacctcgtgagaacagggaggacaggcacagggcatcacgagggtagcataattacagagtgcccaggtcagggcgctgagcctgtacatcaagaaggaggccatgccctggcatccatcagaacctggcatcctgcatactacatctcagagggcaaaaacctccttgggaatgctgttgctaaagaaccagtgctcaggtgaacttgaagcaactgcagacagagaatgagcaacaaagggcttagagacagtgccaaaccccaaacctcctgtgcagcacaaagaccttggggccccctgaggaggtccaagctcccccaaataaggaacaaactccaattcaatcagggaaagagccgggcatcctcttagccattcctgataataggttttttactagctgtgtgcttgttaattatgcctgagttgcgagaaagtttaaggcattggtaacgagctctgccatttactagctctgttccctcaggcaagttatctagccttgctggaccttagtttctccatctgtaaaacggagataattctatctaccctcaaaaggtctaatgattcaataagtccttagaaagtctggcacatcgtggatactattaagtattgcctgataaggataatcaaaatattttccatatagtttaattacattgagctctcattttgagtctgtgagggctaagtcattaaaacatcaatcatttgtacttttcataaagtccaagttcaagaacatgtgtaggtattacagctacctgagccagggggccgaacctgacttccgagagccaagattctgacgcccaggagggcagaactaggtaagcagcatcccctccttcctggatcctattcttttaaggtccatccctgccaggttggcttcaagtcacacagacacagcccaccttggctttttcgaccaggctgaaggcagccctagtgtgtacggagttggttccttccggtgggttcgtggtctcaccaacttcaggaatggagccacggaccttcgcatgagtgttacagctcttaaagatggcacggacccaaagagccagcagcagcaagatttattgtgaaaagcgaaagaacaaaccttcaacaaagcttccacagcatggaacagggacccaggaggttgcctgctggctgaggttgggtgggcttagggggtggctagctttattccctgattgtcccctcccatgttctgtttctgtcctatcagagtgcccttttttcaatcctccccgcaattggctacttttagaatcctgctgattggtgcattttacagagcgttgattggctcattttacagagcgctgattggtgcgtttttcttttttgagatggagtcttgctctgtcgcccaagctggagtgcagtggcgcaatctcggctcactgcaagctccgcccaccgggttcaggccattctcctgcctcagcttcccaagtagctgggactacaggcgcccgccaccacacccggctaattttttgtatttttagtagagatggggtttcaccgtgttagccaggatggtctcgatctcctgacctcgtgatccgcccgccttggcctcccaaagtgctgggattacaggcgtaagccaccacgcccagccgattggtgcattttacaatcctcttgtcagacaggaaagttccccaagtccccactctacccaggaagtccagctggcctcacctccaactagactcggccatggggaccctgcttcaccgttctgagtgtctgcttctcttggcaatggcagagaagtttatctcccctgctgtggggcagtggcaaagtggaaaggagaaaagttcagtatctggcaggaatgtgtttctttaacatttctctgtgcgagaatgggaagagtggcactgggatgggttttctgccatcactgctcagggcctaagagccagggtggagtagcccccttgccctgctgaactcgtgaaggtgagaataccataggcagcccttggagggtaggggagggaatgaatagggtggtttgaagaaaactgatcttggctctgctgaccctggcctgggccaggcagctccctaagggcattgtattataactgttggtagaggggctgcaagattgtgggagcatccccacaaccgggttgtgtccagaaagtgttcccgcccctgcccttttttttttgagactgggttttcttatgttgaccaggctggtctcgaactcctgagttcaagcaatcctcctgcctcagcctctcgagtagctgggaccacaagcacgcgccaccacgcccagctttcccaccctcttcttcatcattttgctttcctggccacaggagcagaggcttttgtgcctggcatctcaccccttggccctcttccaaccccagctccagcagctgcccctcactgtgccttttcggctcagtccttgcacaggtgcaacctggaatggcaatggtgggaggaggaagtgggaggcaagaggagggggataggtgcttcagcctcccggccttcagggagtcgattctgatgtgtactccacaccgcttcaggcccacttaagaaccacctcattaaccctcctcaccccctgattgcttcacatggttgcctccccggttaaccacctgcatccaagttgtctctggccctgcttcctgggagctgcacgctcagatcgcacgtgactgccatccccgtgaaggtgattggccaaaagatagagtgtgtccccaagcagggccaatcagaatcctcccctgggcaaacacgagctgctcacgtgtaggcactgcgtaggctgcaggtggtgcccagcacgtggaggcggcgggatctgggatgtgcgagagagggtgagacccctgcgaaagaagagacaagcaggcgtgagagactaggggagcgtcttggggttttgagcacctgaggctctggttgcttccttgggtctatgagtcccagctttcccagccacatgaggtctaactttcctggagctggggtgaactgggtctgttactcaactgagagagaccaggctaagaggatgtttctgtcttccctcaggaacgaggggtccctgagggaaaggactggggctccttcatctctatgatcctagtgcagtgtctgaaggcatcaggtacgtcatgatgaatgaatgagtgaatgaatgagtgaatgagtgaatgaatgaatgaatgaagaaaggagcgaacgagagagtgggtacattgtggatatcttttgctgttcttcctccctgccatcactgggcctaccttcaacagtctcttttcctatgaaatagaaacaagataattaggctttagatggtgaagtattgcagagtaaaaaaacttgagtaaatgattcaggtcccttgtataggagaaaaggtggggcaaaggaaagatggaaaccgaaggcacctagtgatgcacactcttgatacattactttaaaaatttttgacaaccccacggagtaggcattatccctgtcttacaactgtgtaaactgaggcacagggtggtcaagtactttgcctgaggttttacagatagtaatcagtagacccggggtttgatttaagccgttctcataggtgttaggtggtatcttgtagctttaatttgtattttcctaatgtctaatattgttgggcatcttctatgtccttatttgccatcttgtttagttcatacttgttcaaattttttgtccattaaaaaaattggttgtttactggttgtttattggcttgctattgagttttgagagcgttttttttttaattttctggatactagtcctttatcagatatacgttttgcagatagtttcttttttttatatttttttaaattatactttaagttctagggtacatgtgcacaatgtgcaggtttgttatgtacgtatacatgtgccatgttggtgtgctgcacccattaactcgtcatttacattagatatatctcctaatgctatccatcccccctcccccgaccccatgacaggccccggtgtgtgatgttccccaccctgtgtccaagtgttctcattgttcagttcccacctatgagtgagaacaagctgtgtttggttttctgtcctcgcgatagtttgctgagaatgatggtttccaacttcatccatgtccctacaaaggacatgaattcatccttttttatggctgcatagtattccatggtgtatatgtgccacattttcttaatccagtctatcattgatggacatttgggttggttccaagtatttgctattgtgtatagtgtcacaataaacatacgtgtgcatgtgtctttatagtagcatgatttataatctttgtgtatatacccagtaatgggattgctgggtcaaatggtatctctagtttttgcagatagtttctatcagcctatagccttcttcattttcttaatggtatgtcttgaagagcagagtttttttttatcttgatatagtacagcttatccatttttacttttatgcttggtcctttttgtgccctggacctggaatctaaacccagatctgtgaatgtcaaagtccttcttcttattacatctcacgtagtgttgcctcaaagtctattctaaggccagtgccaggcaccatgagagtcacccaaggagcttgcttacaactgtggagaatctgcttctatgggcctgggtagacctgggaacctgcatattttataaactctccaggtgactgggtgatcagccaggtgtggaaggggctctaatgcagggaccctgacacccctgagcctttagacctggtggcttcttggcctcttttctcctctcctctcctcttctttttctctctctcttttttttttttttttttttttggtggagtcttacgctgtcacctaggctggagtgcagtggcacaatcttggctcactacaactccacctcctgggttcaaatgattctcctgcctcagcctcccgagtagctgggattataggtgcgcgccaccatgcctagctaatttttgtatttttagtagagacagggcttcaccatgttggccaggctggtctcgaactcctgacctcaggtgatcaacccgcctcggcctcccaaagtgctgggattacaggcatgagccaccacacctggccttcttggcctctttctagctgcctcctgtaaagtgctggtgatggtgacatttctaggtctgtttcttatgtgtcccttcccctgccttcctccccagctccttaacacagtatttgacattcagcagatgatgaagacatgcttttaaaccaagcgacccactctctaccagtagaggcgagtggcaacctcactccacagctggcactaagcgagccaagtagaaaccatataattactgaccttggtttagagtgctctcctttagctccttccctccccagccgtgggcggccacttaagccggttgcctcaccctctagcccagccagaggcttccacacctagagaaactgttattttaaagtagctccaagattggctcacggagttgaaaaggacacttgtgtaagtgaacagctatggcagcctccaaataaaagaaaactggattaatttggaacaggggatgggagtggggaaacgaagtgtgttttggcttaggagcaaaacaagcatctagaggtttagcaactttctctggcatgtcagattgtgacatgtcatagggtcagaagtgaatgctgtagggtgacaaagatggtcacctgctttcccccagccaactgggacttcttggggaacagaaatgatttccttcccccaccctcaaagggagcagcaataagaaaactaagatctattgccagggttttatattttatttaatccttccaataacccatagggtcaatattattcacatttttcacatgggcaaactgaggctcaagaggttataaggatagccaggatatgctggagccaggattaggaatgtagcagaggctgagccatgtaataaagaggcctcaaaatacactgctttaaagaatgttgacagttatttcttcctcataaaacatctccaggtcagtaggaaagctctgctccaggcagtcactcagggactcaggatcctgctatctgtggcttcacaggtttctggaattggggtcagcaatctttttctgtaaagagctcgattgtattttagaccatgcaaggcacgtggtctctgtcctgactactcaactcttgtattgtgacagtagacatagacaatatgtaaatcagtgggcatggctgtgttttaataaaactttatttacaaaacaggctggatttttggttcaagggctgtagtttgttgatcaccatcctaggagggtggttctcaaagtatactcccagggaactagcagtatcagggtcatttggaaacagaagtacagcttttgcggtgagtgccaaggccctactgaattagaaactctggggttgagacccagtgatgtgtgttttaacaagtcctccaggtgattcgtatgcatgctgcggtttaagcatcatcactgttatggggtcctacctctcagccctggctgcatctgagcatcacctggagagttttaaaaactcctaatgcctgggccatatctcagggccattaccttggactctctaggggtggaaccagaacttttaaagctgcctgctgattccagagtattgcaaagcactggcctagagcggcgttatcactggtgtggttaaagctggcttgccacctggcttccaaccacacctgcttctccaaggtggggcacccagtgctccctgagatctgggttttggttttttcctttgtcttatcccccaaccccctggcaccctggctccttcctagaaactctctatggggctttgtgattagggaggacctcagttcaagtttgtcgactaaccgatctctggttaggagtgttgcaatacggggttggggggatgacctgtgcgggtgaaggagtgtggaatggaaacaaaccaggagaggaaggagggaggggagagagcaggaggaggacttggatgtagaagcacctggcacagtggcatgtcaccaagattcagtgaaggccagttcccttccccgccttttcctccccagctccatccagcacctggtaggtgcacagccttctggagggaagggaatgctatagggtgacaaagagcagtccctgggtgctgccaagccttcctttatacagtgagcacttagcgttgacagtgtgcctggtagtacagttgtcccccagtatctgtgggagatttgttccaggacccccatgaataccaagattatcaggtgctcagatcctttagtattctaaatgctttatatgaattaatgcattaaatcctcacggcaacccggagggtaggcactgtaattacctccattttacagatggggagctgaggctttaagaagttaggtgacctgcacatggttacacaggtggtaagtggttgagccaggagtcaattcaggaagtttggctccagagctaagctctgctgtcttctcttcataactgcaatggtggccttttttttttttttttttttttttttttttgagacggagttttgctcttgttgcccaggctggagtgcaatggtgcaatcttggctcaccactacctttgcctcccgggttcaagcgattctcttgcctcagccttccaaatagctgagattacagacatgcgccaccacgcctggctaatttttttttttttttttagcagagacgagggttctctgtgttggtcaggctggtctcgaactcccgacctcaggtgatccaccctccttggcctcccaaagtgcaggaattacaggcgtgagccactgcgcctgggcccgtggtggtatttttattcccattttacagatgaagaaactggggccatgcaacttgctcaagatcacagagccaggaggtggtagaggcaggactcgaacccagatctccctgccagcaaagcccttggatttgccagcttgccccacagcctgcatcaggttcccctcccttcttccctccatctgtccacccagcttattctgggtttgcacgtgtggggctgactcatagggagcaggagagcccatcctctggagtgagaaggcagattttatttctgttcagagcatcttgggctggtgctgggagagctgccaagcccagctgacacattttcttctgccaaggctactgagtgggtaggcagccccggggggctctagagggccccaagacaccaactcctcagatgtgtctcagcacctaggggaaagatggggatacctgcttcctctgccttaactgccatctctttccctaagggagtttcctggggctaaaattccagttgctaaaatcttcctcatttctctgctctggtccaaagctgaaaggaaccccaagaagccatttgttcaaggcttttgcttttaggcaatcaaggtagtcctggttgttcccattttacagatcacagaagccagctgtggttctcactggcttgtcctccttcccgttagccctatgatacttcccaaatgtcctttttcctatcagatcatttctcctatcaaatgagcataagaatcccagggcacttgctaactttctggatcacctgtccgctgctgtaaaaaattaggaagcagtcggttagagctggggccctttaccagatgcagtggctaatgcctgtaatctcagcactttgggaggctgaggcaggtggatcacctgagatcaggagttgaagaccagcatggccaacatggtgaaaccccatctctactaaaaatacaaaaattagctgggcgtggtggtgggcgcctgtaatcccagctactcgggaggttgaacctgggaggcagaggttgcagtgagccgagattgcaccactgcactccagcctgggtgacagagtgacactccatctcaaaaaaacaaaaaagagctggggccctttaacaagcactgcaggtgactctcatcatctgggataatgggaaatactggcacacagagacctcccaatgggtgccaggattctcccccacttaaggttcaaaccccgactgactgtcttagctgtgccccaaattgttacaattgccccccgcctcttggatgagtcttgtgggtttggcggctcattcccctccaagcccaactcaggccattagaatggggctgcaggatggtgtggtgtgcctgcatcccccaccccgcccacccttgcccctggccagtcctgccttatcctccaggggctgttcgctgaggatcatggagaccttggcagtgtcctcagatctatggctatcttagcctcacttcagccagacacgccaacactcagggctccccatttgccaagggtccctagcccatttgtttctgttctatgtaagaaaagccaaaagtcactggagaggacatttgtttcaagttgtgatggtttcataatatgtctaaaaattcgttgagcctccttcctgaagtggcagagcctaattttcctctccttgagtgtgggtggactcagtgacttccttctaatgcagaaagtagaaacaagaatatgtgacttctgagactaggtcatgaaaggcaccatggcttccttctctttcctggattactcactgcaagggaaagccagctgccatgttgtgaggatactcaagcaacccagtggagagatggtgagaaactgaagcctcctgccaatagctagcaaagaaacgaggccttttgccaagagctgtgggaataagccatcttggaagccgaaccaccatccccagtcaagccttcggagaactgcagcccaggccaatgttttgtctgcaacctcattagagaccctaagccagaaccacccagccaagctgctgctgaatctctgattcacagaagctgtgagataccaaacgtttgttgttttaagctactaagttgtgggtcattttttaaatgcaatgatgggaaactaatacacaagtcaggagccacagccttcatcgacaagctgagtgggtaggtgagaggactgaggcaggcgtggtacccaaagacctggacagagaaccagcatttgtcaggatggagtgcagtgcttggatgtgtgtccttccatttactgttagtgctattacccctgttgtccatgtcaggaaactggggctcagataggtcaggtcatgtgaccaaggttgccgagctcatcggtggcacagccaggatttgagcccagtctgtctgctctggtccatactttcccactcttgatgctgtcttgatgatctcagtgatttttgggcaagacccaccgcttttggggcttgcatagaacttgagccgactgcatgcatattgatgagaaggttgaacctggtgctctctggccctggattctctaagtaaggtgtgtgaaccctgctctcatagcctttgccctgtagggtgccccagggtaggtcagctctgtctgctaaagatctagtgagccaaggatgaggatgtgacagcttggctttaagagctcctgtgcaaacgtgtagcttccttcagcaataccatctcctgattctccctcacagacatgtgtgcccaggtctgtttgcaatgacaccaacatcacccctgcccttggccttgcccctctcttcacctccgtcctgattcctgctctgtagccacacagatgccaacagctggcacttgtccaagaaacatgtgctcaaggtcaggtgcagtggctcatgcctgtaatcctaggtttttgggaagctgaggagggaggattgcttgaggccaggagttcaagaccagcctgggcaacatgggggtccttgtctctactaaaaaaaaaaaaaaaaaaaaaaaagctgcacatagtgccatgcctatggtcccggctacttgggaggctgaggcaggaggattgcttgacttaaagagattgaggctactatgaaccataatcatgccactacacttcagcccgggtaacagagcgagaccctgtctcaaaaaaaaaaaaaaaaaaaaaacagaaaaagaaacgtgcttggggtaatgcatgttgactccatcttgtcacccagagctcagcaggaggcaccttcctgggagagtcagatcaggagtgcacagggctggacacaagcacctggggcagcctcgggaagctactgctcagcggcatcagaagatcctgcccctctcccggggcctggggcattgcacttggcatctgaagcccttcctccacacccccttctgcaggtgggggcagagcccactctgggatgcctccctctccacagctccatgctttgatgggacactcccctgccacctctctcccaaccacagcttctaccatagccatggccaacagcctccattagcctgtgcttgcaggacagtcgaggggctgcctggagcctcctgcaactccaccctcatcctgctccaccctctccctgaagaacctccacaggctctttggtcctgtttgtgaggaacctggcccctcatcctgctattcagggccctccaagctctttcctgggccctacaccgcaccatcccttttcacagcagcctcttcctaagtggtttgaattttgggtccccaggcctcctcaaactgaaaccccatctgtagacaccctgactcccctccacccacctcccacactagaagtagaggaaaggcagatggatggggtgtctgcccagcctgaggggcaaggtgtggggacaggcagggagggcaggccccaggatggacagatggacaaggcatctggctctcccttttcctgaatggccatgggaggaatgaggttgccaccccatgcctctcacagagatgctgtgagtgtgaatgagaacagcttgtgaggggttctgacaggcatagcctggtgcggagaccttttgtaaccttccggacctggcattgaaccagaggacggatcatgtgacccatgttgctcggcccttttagccttcccggctcatggctcacatcccaaataccctcacgctctgcaggcgctcttaacctggggaggggtatggatttgtttgagggtaggagatgcattgcctgtcttaaatctacagctgtatgcacaaatacttttttatttttttctggagtgtttgccgcttttcaaaggctttgcgaaccataaaatggtctaactaacttggtaccagctttccagtctaggcccacctggatgtttactcccagcaaatctggtttccaagcttaagggctgtcagcatccatcctgatgaagcactcgcctcttcactttgaaattctaacacctaacctgcttcagggagatctgagatcagatcggcacagtgggtacatcctctatccttctcctcctaggctgacctcagtttccctgcatccaaatggatcagtgtcgggttacagctacactccaggctactgacaatgttcccagtgacaggtaaatctccatcccatgcaaacatcttgcatctgagcagcccctttccaaagatgttttcttttgtttcaaacacgagggcttctgccttgtgcaggagttttagtgtgtttcccagaacagaactcagcctcctaaccttaagtataaatagggttgttcacaagctaatgactctgatcatggcaagatgacttctatcttgatctcacctaaattcctcctcaatccgtctttaacctgaggtctgaaagctgaccacagcatgttcacaaaagctaagcagcaaagagaaatggcttccccaaagactgtcctatcccagtacaactttgtcttcttcttattattattttagatggagtctcgctctgtcacccaggctggagtgcagtggcgcaatctcagctcattgcaacctcctcctcccgggttcaagtaattctcctgtctcagcctcccgagtagctgggattacaggtacccaccaccacgccctgctaattttttgtatttttagtagagacggggtttcaccatgttggccacactggtctcgaactcctgaccttgcgatgtgcccgcctcggcctcccaaagtgctgggattacaggcatgagccactgcacccagccatttttttttcacatataataagttcctgaaaatgtctaagaatataaatgtatcaaagttagataataatcttacactatgcaagaaggaggagagcctggcggttaagaatgtggacagtgacctacctacacgggcataaatctgccacttcctaggtgtgtggctgagacctctctgtgcctcagttttctgaaagacggaatgattatagaaaccaccttatagggttcttgtgcaaattaagtaatatatatataaagcgctcagaacagggtcgtatgcactgaatatgttaataattattattttatgttttaaggtggattctatactcagctaaaaataatgacaactccctaattatattttgcttctaagaacattgatcacttataatttatttctaaggccttattttctggctgagtgcagtagctcaagcctgtaatctcagcactttgggaggctgaggtgggaggattgcttgagcccagaagtttgagaccagcctgggcaaaatagtgagaccgccatctctacaaaaaaaaaaagtaaaaagttagccaggtgtggtggcacaagcctgtaagtcccagctacttgggaggctgaggtagaagatcactggaacccaggaggtcaaggctgcgtaggccatgatcatgtcacatcactccagcctgggtgacagtgagaccctaaaaaagaacaactattttacccctcacacatgaatccagtcaaccaacttgagttaaatgaacactgggctaaaatgaaaacaactttcattttttatttttatttttaattaattaattaattaattttttgagacagtcttgctgtattggccaggctggagtgcagtggcacgatctcagctcactgcagcctctgcctctcaggttcaagagaatctcctgcctcggcctcccaagtaactgaggccacaggtgtgccaccatgcccagttaatttttgcattttttagtaaaagccaaattttgccatgttggcccggctggtctcaaaactcctgacctgaggtgatcctcccgcctcagcatcccaaagtgctgggattacaggcatgagccactgtgcctggcctcattttaattttaattatattaactttttgagaccctttcttgtttattacctagtacctatactttaaattttccatttttgctcatttttactatcaataaacacaacaacatattcaaacaattgcatcaacaggctatacaatatgagccaagtggaatagagatacttcaaaaatggggctgctggctggtagtttatgtcacctcatgacatcccaacatatttgccagtggatgtgaaaaagtccagatttggtgaagaaaaatcaatttaggaatgtcaaagtccaaacctataacagtggtgatggttcaaaagccaaaaatccttgaggctgggacgtatgtctgggttcatgtcaatgatcttgttggaagagcaatttgttaccatgaagtaggagacagatagtcttcactttgataacagacccattccaagagagctggctataaagaaactattcatagtgtgagtcacatttttttaaaaattccattataaaactaagacggtcttctaaaggaaaatggagagctttgaaaagttttggtggatagggccaggtctttgtcatgctgggattatggtgagagagatttgaaagcacttttagtaattgctgttccttcctgtagctgaagcttcaaggggagcttcttttcttttttcttttttttttaaacacaagtttccacttttattagttttatataatgatgcaccaaggttcgtcttgggcctcagaatttagctaatgtatgtgttttcttttctttctttttttttaaattttattattattatactttaagttctagggtacatgtgcacaacgtgcaggtttgttacacatgtatacatgtgccacgttggtgtgctgcacccattaactcgtcatttagcattaggtatatctcctaatgctatccctccccactccccctaccccacaacagtccccggtgtgtgatgttccccttcctggtccgtgtgttctcattgttcaattcccacctgtgagtgagaacatgcggtgtttggtttttttgtccttacgatagtttgccgagaatgatggtttccagcttctggaaatacggtgaaatttacggcagactgcctaagtttacaaggagcaacagatactccaggctacctcctcagtgtggcctgatccctcccccttttattctcctagagagtgtctcacattatagctgataacactcactaatgtctccatttcttttttcttttcttttcgttttttgaagacaggtttgttttgttgcctaggctggagtgcaatggtgcagtcatggcttattgcagctgtaatctcacagactcaaatgatcctctagcctcagtctcccaagtacttgggactgcaggcatgagccaccaggcccagctaatttatttttattttcatttttgtggagacagggtccctctatgttgtccaggttggtctccatctcctgggatcaagcagtcctcctgctttggcctcccaaagtgttaggattacaggcgtgagcccccgcacctggccttcagttctttttcaccacatttcattgtgtccttttgcgattggggtttagatagctagaggtggagttctttactttcctgacagttagggtttatgcagtcttggtatgctcccttctttgatggctacattctggaagctggggaagacgcgtgtaagcctgagcagtatgtctggcaccgaaacatcaagagagccctgatgccacccgaggccttcacatgttgacgagatggctatgtatacacaagggctcctgcggcgggcggagtgggggatgccatcaccagatagaacttcataagacaaaacatcaaattccttccttcccctctcttagtaatggtccgccctatttaatcctgggatgtgagttcttttggtgatgggggtttgctgaattgatagggaatggtgccagtggttatgtccgagtggcattgaaccatagaaacatttctgaatgtttcttctatttctatcccctaatcttttcatgccactaggcatgtgaggccaacatggccttctaagcttctacagtcagcctggctgccactgtccctgcatgattttggcgactctaaggaagtcccagagaccaaggagagtccagtcttgtggtcctggccagaactgaaatttcaccattgactttgtcatcgtgctgtgtgcttctccaaaccacaagggttcctcctgcttccgggggcctcagctctatccttgcagctctcgtgagcctcaagttctcatgcagttttcagattaggtggttccaggaactcacacctatctcctttctcctgtgccattgtcagagatgacagcagatcatgttccacagtgggaatggccagttaacatatgcaacacttccctttgaaagcaccttaagtggagaattctagaaaataaaccaggctgggcatgatggctcatgcctataatcccagcactttgggaggccgaggtgagaggctgccgaggtgagaggctcacgaggtcaggagtttgagaccagcctgaccaacatggtgaaaccctgtctctactaagaatacaaaaattagctgggcatggcggcacacacctgaaatcccagctactcaggaggctgaggccggagaattgctagaacccgggaggcgaaagttgcagtgagctgagatcataccactgcactccagtctgggtgacagcaagactccatctcaaaaaaaaaaaaaaaaaaaaaaaagagagaaaaaaacttgcccactttcatcaatcttggaagctcagaccttagtaaaatttatttatttcaaagaaggtgcaataaaattgttcaagcccacttggaaatccattgtaagaggtgctggcattttgaaaaatcattttgctgattgcgagagtaatacatgctcattgcaaataattaagaaaatacaaaaaggtacatagaaataaaatctcccaagatgttacctctcagaaataaccattattagcatttaatatgccactcctttttctgtgcacagcaatttataaaattacatggtactttatctacaatttttcatcttgcttttttcaccttaaacaaccagaacattcttccatgtcatcgtctactcttcaaaaacaccgttttaatgactacataatatttcattgtctggttgtaccaggatttatttagccagttctctatttgcaggcttctaggaggtttcttatttttcatgattataaatgatgctgcagtgaatattcttgtccaggaaatctttatctgggtttctgataatttccttagaagagattccaagaagggaaattgtggagtctcaattctgctgggtgttacctgtctcctatggatgctcagaaaggcggagtggctcctgttaccctgagtgggtagcatttcctgccgctaaggcctcctaaaggcctagaccacacaatttttattcctgctggggagagatggaaaaggggcccctgagcctccccagacagatcccaactactcacctgaacctgctccgtacaaagcagagcatccccctgcaggactcatttcataattaacttagagactaaagcatatttaattaaccatggaaaccctcccagccatctgcctctgtttttattttgaggaaaatggcagatttttttttttttccttaactccctctttttggggatggagctcatttccagcatcttggttcttgtatagagctgggtcctctcccctgctgatggccactccagagtgtcagagtcaggggttagcttgaggtgggaggctgggtgagaggttgcacaagggcctgggcttggcctctaaggccaagtccctgcctggggtgagctcagccaggcaaaggtggcacccatgcactacagtgtggaccttcaaggacctagcctcagactcttggctgctgtcctaaacttacagggctgcagagaggggcagagctcagagaaagaagccaacactctcattccacaggtgaggaaactgaggcccagacaggctccaggtcaagcctgagcacagagattttcaggccccttgtttgcttctttgttgtagcctcaaaggagtggggacggctttgatttcactgcactccaaggtcaggggatttaaacggagttctgggggctgtaacagcccacaatgttggagcactttgaaatgtgcaaaacgcgtttgcagatcacatctcgctgaatactcaacccaggctccagagactccggggtcacgtgacatgcatatagtcacacagctggtgagtgttgaggctgtgatggaaacgagaagtgctttggtctgaattcccaatgtagcagaatggcttttgttctcacagtattcgtcagaggccctggactgggaactcatagcggaaaggcctgaaggaatattagtccagttatttctagtgacatcacctcctccaggaacctttcctgggctatcgccccaggctgagttgggagggagggctggatctctgaccttttatcaacccccacacaccacagcattataccctagggcgcaatacttcatgctatactccaggttctagcaaagggtctggcttatactagttgatcagtaagtggtattgaattgaatgagatcaaatgtggacgccggtgtaattgcttcagcgcctcacttttccttccctcaggaggtcatctgagagctctctcggggtggatgtcacatgtgctttgggatggtccccaagggctgccatatggaccgatctatgtgccaggctggccatgtgccccggatcctggagctgtcagaagggctggagatctagcccacagaccccggccaggtagcatcacctttaatagatgtgtggccaggcctggcaggggactggggacatctgccacctgtgcttttagtaaatcatgcccaccctctgagactcatttgctcctctatcagatgaaggcaatttgattggacccttccagccctgatgatccatgtcctatgactttataatgtccccaggcaggggccaggagtggcagagaaccaatcctccctcccaaatcagttttgggggttagtccaggaaagctttctggaagaggagatcttagaaataactggactaatgttccattggacctttcctctgtgagctcccagttcaggacctctgatagggaccagggcaaaaagacggagagtcaactccagccagaagtcagaaagctggagctgctaaccaagctaaaatgtatcctgcatagaaaagacagtaaagtaccaggtttcctggagccactttaatgttcctgccaggctgaaaatctctctccttttaagatataaaagatttgctccctgacactcatcttcaatcattttctgtctctcttcagccactacagcctgcattgaaggcgagggaatccacggtgatgaattaggcatctgtagatatttctccagagctgcatctgttaaacccaaagcaggtcttggctccactgaaatcaaattcaacatgaaaagccctcaatgtggagccctggggcacccccagcccagagccacgctgcagcctccccctgatccccgctccgtggcacatcgcacatcacatgggccacctattctgtaaattactgtaaaattctagtagagaacttatcttttttcctatcaagagaatgacctacagaatgaaaaaataattcaatggaggaagatgaaagtaaaatgcagcttcattcagggagcttttgggagagaaaaatagaaaatgcctctgtcatttgcttttaaaaatcaagaatggggagcatgtaactctctccagtaaatacaactagtaatacaaatgctctttagttgtatgctgtggccggttcttggagagaggctgaaggggaaggaggaggaaggggctcaagaagtaggacagggggagagaagcagccagaaacaggtgactagaaagaaggaaaaaaaaatcaaaactccgtaaaagagagggcatgaatgacagtcgcaggcaaagcaacacaaaaatacagacaaagagaagcatgcacacatcacagcccagccacttgataggagagagacggagatggggaggctagaggaagagaagcagacacagagagggacatgggagggagacaggcgaagatgggctcagcaagcaatacagctatttaaaaacaaccaacaccacaatcgaggcttgtttttgtttttaaagaagcaaacattatcagaattatgttttcccagcattactttttaatgtgtttgcattcctgtccaactttgagaagctcaggcattcttaaaaatccattctcctcatttgccacccagagaactcctcgttaacagttcccggcaaggagatctcacacctcgtgctgtaaccttttcagatgatgccgctgaaaaccttaaagtactgttgtgttttcacagtgctgttgtgttttcacgtggtcacacctctctgtgcagctctatgggtgccttttgctcaaccccatcccgcctttgcagagaccacagattcagaatcgaggatgatccagccagggccagagctgaccattccatgctgcttggtgacaaggtttgctcagcaaataagtaatgaaaataagatgacagcggatgtgtagaatgaatgaaaagaaggagtgccaggccctccagccgcatcatacccagtaaaagcttcccaaacctgccaagcgctctcgcacctcgctgccagaaactcctctttcctcccctgcctctgctgtgggaaacccttcccacccatcgttcatcaatcaattcattgtattaagcatctcctctgggaattttttcccaaccctcctcctccctgggggttaatcgttccttcatttggcttcctgtcttgctacctctgccgtaggtcttagcatatttcattagagcaagatttctcaaccttgccctgttattttgggccagatactgctttgttggagggcagggaggggctgtcctgtgcactgcagctttagcagcatccctctcctctgcccactggatgccagcagccccactcccctggtcgcaactaccaaaacaatctccagccgttgccagatatccctcaaatcacacccaaagacaccaagtgagagcagttgttgggggtgtcagcctcagagacagtgtggcctctggagtctcagtgttagaacagtggatggcatagaggaagcacctggattctgtagaagaagaatccggatgcttggactctgcccgtgggtgggtagataatgaactggccagttgcacacgagccatgttgatcgttgaaacaggagtgttggtgcattaggtccaaaagcaaatccaccagtctattgaatgatgtgtgggagacacaaggaataagaaagaaagcatctctgtttaaggcttttgtgatctagttcatcagaaaaggcctgtagccacgggacgctgatgtaagaataacgggcagtttgtaatgagttctgaagcagtgcaggttcctctacatgggtttaggtatttagaaaaggggaagccagggtgggctacttttcctgtggagggcctagggggctccatggaacttgaccagggcctttaaagatgggatggacttgaggttgcggggtgagtgtggtgtggcttacagcagaaagtgtttactccaaggggcagatccagccaggcccataagttgggtcttgatgctaggaggccaagtctcttcaaatatgtcctgaacagcctgcagcagggtcgcctggggttgctggtcataaatgcagattcctgaaccccccaggcttagtgacttgctatccctggggtgggcccaggaccctattctgtttttttcacatgccccgccacccagctgattctgatgctctgtgaagtttgagacccatttccttgtggttggtggggagtgattgaacagtcctggtaataaacttggccttccattgtgtgtagcctgtagggttgacttggtccagcagagcagttaagtacacaggttgtagtgccaggctgccagggtgcaaatcttggtcctgtcatttctagctgtgcaaccttgggccagtcacttgaaatctctgtgcctcaaacttttcatccataatatggggttaacaagtccctacctcacaagatatttgggaaaattaaattaagtcaaacatataaatgcttagcatggagcctggcagatagtaaacactcactcataaatataagtcatcaccatcatcattattttagcatttgaggcttgcaaagagtttgacaaagctgaagtctcctttattaaaaatgtggtctgtcatccatggccctcctctgctcccctcagcttgcctctagttcctccaaaacctgaagtttaattgcctgagcccttctccaggaggaagatggaccctgaggtgctctgagtggaggagcagtgttgggacgaacaagggagtgtccctggcagtgtcaggcccctcccagtctttggctcggagaggaaacacttcttgcctccccagccctgggatggacatattggaggcccagaacatccttttgccactaccagatggccgtgccactcctcagcaagtctctcccagagggaggcctgagccagggcagaaaagagggaagagcagaaaacagctccgtctgtggcagatgccataccccagtcttctggttttttgttttgtttttatatatttatttattttttttttgagacagggactcactctgtctcccaggctggagtgcagtggcatgaactcggctcactgcaacttctgcctcccaggttcaagtgattctctcacctcagcctcttgagtagctgggactacagacgtgcaccaccatgcctggctaatttttgtatttttagtacagataggatttcaccatgttgtccaggctagtctcaaactcctgacctcaagtgacccacccgcctcggcctcccaaagtgctgggattacaggcatgagccaccacacccggcccatatcccagccttctaagagtataatgtggcgttcaaaacctggcacacatgccttccttagagtcttacaatgaccccaggaagtgggtggggaggccttgcccacccatttacaaaaataacagctttttggagataaaatttacataccataaaattcatccttttgaagtatacaattcaatggcttatagtatattcacggagttgtgcagccgtctcctctagccaattttagaacatttcatcaccccctaaaaagaacattttaatcactcccatttccccctccttccagcccttgacaaccacgaatgtcttctctgtctctatggatttgcccactctggacatttcatatacaaatggattcatgcaatatgtggacatttgtgtctggattccttcactcagcacagtgttttcaaggttcatacatgtcgtaccatgtgtcggtatttttgttccttttctttttagtactttattcctttttatggttaagtaatattctgttgtatggacatatgacattttgtttatccatgcatctgttgatggacatttgggttctttaaactttttggctattatggataatgctgctatgaacattcacatacaagtttttatatggatgtacattttcatttgtcttgggtataaacctaggagtggaattgctgagtcataaggtaactctatgtttaaacttttgaggaatcaccagattgatttccatggtggctgcaccatttataatctcaaaaaaagggcataagcattcctgttttttccatgttcttgccagtacttattacaggttgagcacccctaatccaaaaatcccaaatcccaaatgctctaaaatctgaaactttttgagtgttgacatgatgccatcagtgggaaactcccatgtgaccgcctgcagtcaaaacaccatcaaaaccttgttttatgcacaagattatttaaaatactgtggaaaatcaccttcagactatttgtattaggtgtgtatgaaacataaataaatttcatgtttaaacttgggtcccatccccaagatatctctttatatatatgcaaattttccaaaatctgaaaatttttggtcccaacatttcatgtaaggggtactcaacctgtatctgtccttttgattacagccgtcctattgggtgtgaattggtatgtcattgtaggttcactccttatagatgaggaaattaaggctcaagaggcaaagcaacttggccaagtacactcagatagccaggggcaaagccagaattcaaaccagacacatctcacttcaacatccattttcttgttttcctcttacatcaggcagccctccagctgaatgatttttgtctgtgcctggcccagtccctgagtccaaagtggtttttaggattcacatcggttacaggaccgggccatggtctgcccacctgaagctgaccacctggtcactgttcactctcccagccagtctgccggccaaagtccattgaacgcctactgtgtgccgagctcaggagctgtaagtagattaaggacggcacagagcccactctcaaaaatggactgattgcttttaatgtgtctcatcaaatgaaagatgaaattttagactctagatttacacggtgccagaaaagtgcagaaagctgacctgggaggagaagtgaaaaagaagaatggcaagggacccccggctggagagttgaagggcgatggcctgagccagtttcagaaagatttggtgccaatgctgagggccatggccaggaagaagaggaccacgttagagaggtaggttggaactgctttcagggatggggtttagcaagaaactgaggagcaattaagagggaaaaataaaggagtcagaaggaggaggggagaaagaacaagggctaatctgtgtaattatacaaatatacagcttccatttagcaggcctctctgaggggcaggatctgtgctgagcgctttgcataccctgcaaggtacattgttaatattcttattttatagacaggaaactgaggctcagagatattaagtgctttcgccaaggaatacagttggtaacattcaatcagactttaaatcctattctcttaaccactcgaacgtctactgagtgagtaaccaagggatgcttatgagggaacgtgccgtcaggggtgctggaaataggaaccaggctcagctttccctctggaaggctggtatttttggaaatagaaatgctttggagctaatggtttttcctgtaatggtttcagcctgtttggggttttcacgcttcagtttacagtctgagccactggtgtgtactcatttattcctttttacaggaaaaaaaaaaaccccaatgaatttttgatcaaattgagcttgactatttgaccagtgaatcagaaagtcttccaagtcttaggaaggaggtggaagtgaagatggaaaatgtatacccatctctcttcaagaaggtagagtgagggaggcccctcctgggggttctgggacaaaaggagtggaaattaaacccacaggctgtctgcagcaggatcaccaagcgctctaggtcattgcgtctctcaggggatagcaactggtcaagattctgctggtacatcaaacattcagctgcatgatgatggtctagaccagggcagcacatttttctataaagagccagataattgtaggctttgcaggacacctatggtccccatcacacatttgtgtcttcctccttccccttcctcatttccttctctttcctcttcttccagaagcatttaaaaatgcaaaaaaaaattaaattcttagctggagggctatacagaaaacagactatgggtcagatttgcctgatggccataattggccaacccctggtctagatatcttttggaaactaacttggatgaattgcttaactttctggagcattatataatgtatctattgaacacctactgtacacatagcttcataccagttgcaatagaaagaacacaaagataaatgaatgaagaagctttgctgtagctgctgtgggtgtaatgtaggggaaacagcagcagacctagagccagaagacttggataccaagcctacttcagtccctgaagagcctgcagagccacatctgtaaatggggaaaataaagcatcctttgcctgattaaataagctcaggagtaaagtcattttgaaaagcactacataataggaactatatttagagagttgaggttacacatgcctatgaatagttgactcacaatataaagactgtataaagctatgatgtcagaggtgttaagagagaaaagagattgacacactgtcatataggactccctatgccaggtactctcacctgtgttagcctgtgagtgatttaggcagtgtacccattagaattgggtttggctgcttcctacaggaagcccaaagtaaaaatggtctaaccaagacaaaaatataactcttagcctgggcaataaagtgagaccttgtcactatttttaaaaattttaaaaatagccaggcatggtagtgcacacctgtggtcccagctactcagtaggctgaggcaggaagatggcctgaatccaggagttcaaggccacagtgagcttataattgtgccactgcactccagcctgggtgacagagtgagactctgtctcaaaaaagaaagagagagagggagagagagagggagggaggggagggggggaggggaggggagggaaagggatgctgtcatttgaagtggaggtatgcagtccagaacgtggagagcatccccacagtgtcaggaacccagggtccttctcctttgctccattatccttgcatgtaactcccattcaacaaagacatctcataggccaaaatggctgcttgacctccagccattacatctgcattccaggcatgtgaaaggaggaaggaacaaagaagaaagggctaaaggacatatgctaggagcctttcacaaaaatgtactggaagctggctccaaatactgctccttatatctaatttgctatacttagcaacaaaagagactgtgaaaaccagtctttattgtgggtggccatgtgcccaggtaaaactacaaggttctgtttttaaagaggaggataatcaaccctgggataagcaactagctatggctatcataggtaacaagttcatagaaagacaaagtcagggaaggctttattaagagagtgagatagcatggcttgaggaaatgagttggaggtctggagggagatagtgggcaaactagtctagtctagactactcttgtagaggaggtttcaggttttaatgctggaaaagatactaattaaaataatactataaccagttgggtaccctaccaccttgggtgatgcaccaccccttgatgactttgtgactcctcagaagctcctcccctcctccccctcctcttccccttccttcaatatgtcacccacacagccttcttctgctagggctgccacttcccaggaggtggtcctcaggtcttcctgagtgggtccctcaatgcagctcaagcccatccaccttcccctgcatctcccagtccttggagagacttgtatctttgctgcactaaactctacaagtgaggattgtttcctgctcagtactctctttctctcagctgtagacacaggctgctccagttctcttgacttgagactctttgggaggtgactggttgggccctagtttctgtgttcttccagctctgcgggttgcaggtcaggttcttccctatatctctcattccagctccatgacggcatccagccagtggaacacccacagttagcttggggagatggagatggggaggccctgggtcatcccaggcctcactactagctgagaagtctaaaaatccccacctccctctaatcacctcgatgaacctctagccttctctttggcatgggctaaggtgtaatggggcaggggatgcagaaccagtgagggaccattctcagcaagtcccaactggatggtctggcatctcccttcacagtgtgtgggcaattcacacctgaagttctcagccttgggacctcagaggagattctaaaacaacagggcaagcccctggtgaatgtcctcttaaatatattccatttattgacttctaactatgtgtcaggcacaactaacccactaccaatgaagtctttacaggtaaagagactgatgatggtggaaaggcaggtgaggactggacgattccagaaagaagtcatgagaaatgaggccaggaaagagaggtggaggcagatggcagaggctttagtgcgggactgagaagctctgaccttctcctgtaagtgcagggaaccatcgaaggattctaagcatatgtgacgtggtctcagttgtggttttggaaactatctccaagtagagtgtgggaaggattggaaagagagggccaaatgtctttccattagagcgtgagtcctgggaagcagtggagagggactgggtatggggaaaagaatgaggaggaagaggaaggaagatataggggaagagaggaaggagaggggacaagagaaggaaaggggaagaagaagggggaggaagaaagcgaggagatttgattcctctcttcctctctttcctgtcctctcctctcctctttttttcttttcttctcctttttttttttgagacagagtttcactctatcgcccaggctggaaagcaatggtgtgatctcagctcactgcaacctctgcctcctgggttcaagcaattctcctgcctcagcctcctgagtagctgggactacaggcatgcactaccatacccagcttttttttttttttttttttttttggatttttcatagagacagggtttcaccattttggccaggctggtcttgaactcctgacctcaggtgatccgcccaccttggcctcccaaagtgctaagattacaggcataagccactgcgcccagcctggtccttctatttcatttgctcaacagaaacatacaatttgtgagcacccaccacatgtgagaggggcttggacaaacaaggtggaccatcatggtccttgtgagagctcataacgaggaagggaagagggaagaggatgccaattgatgtgtacagggtcctctggagctgacaaatggccttgacaaatactatctccctccatccctgcacccgttctgtaaaataagcaggacagacatgcttatgctcatttcataaatgagagaactcagcactggttaacttactcagggttctacagctgggagaaggcggagctgggattcaaatccagtgctgtttctgctacatcaagtacacacaggaaaggtacccagagctcaaggggaaggtagaatttggcagagtgattaagggctggattccggagtccgactgtctggctccaaagcctgtctccatctcgctgtgtgtgaaccgtagatgagtttcttaactctctatgctttagccccttcacctgtaacatgtgaagaatggtgcccacctcctagggttgcatgaggctcacataagctatagttcaggcctggcccaaagtaagcactctgaaagggattctgccattaccattacattttgaggtgggtgggtacagggaggtggtccaggcagaagcaatgagccatctcaaggggaagtgcagggacccaggccactgtcaggacctcctttctgggcccagaccccctagatgccctggacctagtcttttgcttcctctcctgtatccttgcccatcatcctcttcctctccctttctttgttccatccatttcccctttcttccctgctgatccttgctcagttctgttgagccctggaggctgaagactgtgctaacacttccccaccacccccatgtgactatgggccaagaaccagccttccaaattgctttgacatccactgaggagcatgttccaggaatatcagctgttcagccggtctgctaaagggcatggtcagagcacctggcttttcctgtggggagaggcttctgcaggcaaacgcctctccctcctcactgccccttatcctgcttcccagtctgcatggtctcttttttattaaaggagactgggagagaggctgagagagagggagggaaatattagaaatattgtcacaacctgctccccggcttcacagaaggtaatcatcaggaaagagacgagaagagaactgggctctgtggttatctcagctattagtaggagattatttgttcatcagcctgtaaaaagttcccagctttggcaaaggtaattaccagcctaggtggctgggccaggtcgggacatggggggaggtgaagctgtcatttccaattcaccagcctccatttgctgtttggtcaagaggttcaaatgaaaaggttaattaagaatcagaggatttgctcatcaggttaagtcatgtatacacagcacaaagggcatgtctatacatgataactgcttttaaagaaaccaattcaattcagcatgcatttgttgacacactcacctcccccacccccaacacacttacaacctctcggggttaggtgtgtgctagcctctttgtttgttacaggggatatgatagccggtgaggtatgggtacttgcttgggatatatggctccctctgcaatggagatcagcccacaaatgtgggggctccagtcaaactagctacttgcctactgtgtgtcccttgggcaaataactctctgtcttggaggaggttagagtagatctgcaattcctagtcataatagtctgcggattggggaaaaggagatgcaatagaaccattctggacaacttttaaaaatatactccctacaggaattctgatagttgcccttctcccaatttcatccaagtctcttggtacatgtagtggatgctgtagaatgtcaacctggtccctccttcaggattgaggtcctcacttctccagttgcagctaggagtattgacagatgatgtctctcagctaggtccctctctaggaattgcctcagccaaggagagccaagttcacttccttggggcagcctgcatcaaactgtggatgtgggggtgtaaatacccattccttttgcttcaggacaggacaacttagaaggccatcctagctccagaactcccggtaggcttggctgggacccttcatcccagctcagtttctctctctgcctaatcccatttccttccctctcctccacacccccttccctctcctccccaccccaagttgttgatgccaaaagcaacctcaataaatttcctgcatgaaaatatccatttcagagtctgtttcccaggaaacccaacccaaggcagcacacacaaaaaattgagactcaccagatccaatgatcggcaggagccgttcatccattcagcaaacgagtgtttggcacctatgttaactctagccctagaagacgtcctgggtgaggaaagattccaagtgggcctcaaagagtgggcagagtgtggaaggaggaggagaggcaatgaatttagtggaatcattgtgtgttttggagtgcacacgtggagtgaccaactagatgtctgaaattatcctggagtgccgaattactaattccagctctggagtgtccctatctgacctttagtgggtgcaggattattgcctgtggaaaattctgtcttgcttctgccatgtgttatgtcccaatggcaacctgtcctcacaccctacctttaaagaggtgatctgtctccatctcacagccaacatcaacaagggaaagctcctacctccatggtattatttgcagcctttgttctgaacctatcaatcgcttcaccctcttggaatcttctctgaattgttcctgaggcctcagctgccagcctcttgccctaccccctgaccagggccttgcaggctctccttgaccctgatgactgatgtttccctcccaaccctcagcctttgactccccactcatttataatccagacacattcttcatcacatctgtcttctgccatgccaggggtctccccagcccagcctgtcccaggctttacctcagcactgccccagatggtcaggtgctctgctggcctataagccctgtgacctcagactgactgtgtagtgtttagagggggatctggagctctaaaaggagttggggattgtgactatgactggggcacatgactgagatggtcctcttattctaataacagcaggaaatgctgttaggtcacctcctttccagggttctgcatctttactcccacctggcatagtttggcttctggcttccagtccagtatccccaggaaacaggcagacttgagcagagctgaatcctcagtgaggcactggagactttgtcttaaaggaaatcaggaaggagagacacaaaatagaaaacagcctgggaagaaggggttctgtccatggttctgaaaaaacaatcccaggaatactgtgattacttgctgaccttccacctgaggctcagcgctcagctgtacattgtgaggagcccaaaggacatgggatcccagttcctgccataaaaggtcctttaggcaagttggacacaataaaacacctacatgagaacacacaggaataattctgagcagtccaaataatgatgggtctcagaaaactgcacataggagagttctggctgccttgataaaggggaccttgaggcaaaccccattttaggctctaggccctttgaagaaaaaaccactttgtaatgaaatgctctttctttagtcaccataccattccctgcagtatttaaaacctaaaggtcttggatataaaactagtttatctaaatgcagcagtgcagcagtttaaatttaggtgctaatgctatgtttgaaatgtaagcataccattggcttttagttatgtctttaaaaaaggattggtgagtcatttttgtctgggtgccccagctccaggccatatggccacggtctctcaacccttgcttgtcatagtcacacagagctgaccctataagcaagaggctccagagcctcactttccagggcagcctgaggccctgggacatgtacacagcagcgtgtctgccacacccactgctgatgggagtgcgctccctccccaggcgctgctctgtcctcagcattgtgaggatcttagtatgcagagacaacgcatggcctccctgctctgctcccagcaggtgccctcccttgccttgcatgaggaaaggctgcaactttgagctccctctttagctagggagcctcccttgcctccctcactgggtctcaggaggaaagagcttgcgtacatcttcatccagcctctgtatctttgtggaggtcttctcattcacagacaaaaggaactgctttaggtctatcttcggaattggaaaaattaatattcataagacaaataccctgatccctgaccaacctgatgtctgaggggcagatcacacatctattgacctcagtttctcctttaaaacaagaggagctgactggatgatcaaacaggtttctgctgattcatcctaacagtctctgaatcagaaggagtgggatgagtccttctttaccttagataaatatgtaccctatccatctaccccactccctgaagtcttacctccctgagagccaatactcagggaattctgtgtccatgagaacacttctttttttcctctcatctgggactgttgctctctattccatttgatttcctacctatggaactggggtagaaaacatggatcctataggaacccttcacttatctctcctgagaccttcactagagccagcctctcttttgagctctgctttaatttcttctaactaccaagaggaagggcagagggcatgtcctgctccacagcctcaccaccttgggaagataaaaaaagagaagaaagagtcgatttccactcttccagacaaatccctcatttcaaaaccttcaggaaaaaactgggtgatcccaggaggaggctggcacacagggaagggtgtgggaaaaagacataaacctcaattcagtgggtggtaaagattacccaagaaggtttctcagagaagctatcagaacaggcattgaatgaggatctgtagagatatagggagaagacagaggcataccttgtaaagacagaagcagtaattggcaagtcacttgtatttggggagcgggagagttccagtgggctccagcgggctgcgggaagagagtgagatgcatttggcgagatgcaggattgtggggcgggcaaatgatgagggccttgcatgctggagtctattttctgcaataggaacaagaaggacgttgatcctgatgccgggtctctgtgggttgggtgtttgtcctgggactcccaaacttggggagaatgtagggctcagacataagtttgtgtaagtgtgtgaacatgcatgggaaatgcaatggatacagagtttcatttgagccattctggcttggtccaaatttattttaatttggtcaagagtatgaaatccacattactagtcattggtaactcaagccgaggctccagtgactgtcaggctgcgtgattgcttccctgcaaggacaaaggagaatgaagcttacatgcttggtaaatattggggtggggaagagaaatggatgttttttcttttcagtccatcgattttgttattctcaattgctgtcccagtggacccacatgctccacacatccctgaatattctctcacatctggcacgacttgggacaggagcggaaatgctgggaggggtatctggagaagagtctggaatgcttcttggaggttcagccacgtttgaatgtgcagcaggactgccccagccactcagggccagtcatctctcactcttgcttccagtcccattttctgccctactttccaaatgtgatagttgcttttagtagaaatccacaagcatttgccttcagggcctccaagagctccccttccagtctcccactggctccccctccacctgcagcaacacaggagccaaacctgggatttaccactgctgccccatctgcatcaggggccagtcttgggacctgcaggaagggtggggaaagtatgttgggcctgttgacataagtgagtcactgtgagtgggagcagatgacagggagagtatgactcagtgaagggaatacaatgtgggtgaacacaaggggtttgcaaatttttacctgcccaagggaatgtggaaactcaggggacttggagcaggcccagctggtgcttactgatgccatgttggcccaatggtgctgctgttttcaggttctctctgggtaaccaatacgtatgtggtagtcttcctgaacttgtctcttctgcattctttggtgactccttgtatcttgacccctttagtccttctttgccagggagggtggtgaacagaggcctcaaggaatcctcagccagtgtcccagctactgggtccacatccatcagaggagcatggagctgggaccagtgtcttgatctgagtttcagaacagagtctgccatagggaaaggctcttaagcatctgacttagtcactgaacattgtgatgctctgcataggtctctctttttggaatatgggaagagggacagtatcctagatgctaagggctgctgccttccttctttggccagcagcttgttgggagcaggagagtaaagtcgtccaagctatacaaggaagaagagcaggggaacgctgccacaagcctcatgacactggcagccacctgcctcagggcctttgcacatgctctcccccttcccttcacatggaaggctcctccccatacacctgcatggccagtgtcctcacctcctttagatctttgttcagatgtcacatttttggtgaggcttccctgaccacagtatttaaaatgccaccctacccacagcattttccgtcttcctttcctgccttattttttccccatatgccttctcaccaactaatatactgttactcatttactatgtttattttatacctcctcctattagaatgcaggcttcatgaggataggcattcagtctgttttgttcattgcagtatctccaatccctagaacagtgcctggcacaaagaaggttcccattaatcttagttgaagatttagtgaattgaccaagaatattctgagtgctagtaggaaaggttatatgcccaggcaggggttacccactgcagaggatggagtggacaaagaaaggctcagactgggattcaggggagctgggtgcaagccccagccctggccctctccagcagcaaagtggagataagccagcccactctgcatcctctgggtaatggaagtatcatcactttgtaaattataaagagtggcctgtatggctctcatcctgactccactgtggtgtatgggctgaccctgagttgcagtgtgatcagatggggttggggttagtagagaaggttttgtggaggaagtgcgtcttgggatgggctctagatatgcagggaaccgcactggcaaaggcccagaggaacaaggagtttggggtgggagacaggcagggcctctgtggagattgttctgatgctaattcagaggcaccagggactagggaagcttctgcctttcgtggccacaattctcaggctagttgcccgggtgtgagctatagtctgctcaagccgtgcttgttacagggaactgcgacccactgcgctgccttgagtgaaggggtgttgctgattgtcaaagatgacaaacaggcagcctcaaggctgtggaatgggcttttggaggctggagctggatgagcagggagcccttctcctgggccccgtcagcctactcacttttcataaggtccaacttagcggccactgtcttttccccctgtttggtttcagtctccattcctgactatggatttctgtgtgtctcaatgttctcaaaagagaaagcatttctaatgcccttgaatcagcctatggatgggagagtcacttgctcacctctcatccatctcctgtagcctagaggggacaaagtcgcatggtacatgacgggagggcttccctcttcagtgccagcagaaaggagtatggatctaggaaggcagttgggcagggaaggccaaatggctaggactcaggcacaagtcctaagaccatcctgcagaccagggctcccagtgtggattcagggagaaaaataaaagggctgtttccacagtgaccctgcctgaactttaggctgtatcttatttttttaaatttctttttctcttttcccccctcattcttgctgtcatcttataagctttatctttgtggtctcttcactccagcccgactcacccactcaccagtgcctacttctgctcatgtcctctccctggccaactcatttccattgattcaaatcctatccatccttccaagctcagctctgccccatctcctgccggggtactgccttgatcactccagcccttccatctcccctcctctcttcctctcattcttatgtctcttcctggttattttcagcttccctgacccttcatgtaaactgtctggtgatagatggcctttgtagggtcgtcttgtattgccacttatttctggtaatttttcatgccttgctttccaattggtcaacaggacaaacatcacacaccccctcaggtctttcctgggcacataaagatccttgtagacatgcacagccatttgcctttggggcaagaaggctttaaccaccatcaggtcaaatctgagagatgaggaaacagaagtctagagaagaggagtattttgccccaaatcacatagtcaaggtcagcgtggaattcaggtctcttggctctttacccaggcaagaactatgagaagcagctttggctgtgaagttggtaccatagtgttgcaaagtacaccagagccaaggtggccagtggcagttggggaggtctcatgcatcagagagtgagtggctgcccacctgggtggatgcatcccctgcctccttgcagggtcccagagcctcatattctgccaggagccatctgttcctttggaaactgccatttcccccactcagtttcctcttttaaaatgcaaactcctaagagatgggctcaagggcacaggctggcagggaactctggctgggtcccccttggaaggagagggggagtggtggcagaggagccttacaacttcaccgtgtccactgccaaagtgcgcatttcctgattggcaggtggaccaaataaaagccagcccagggatctggggagaataaatctcaatgaaatgttttttatcagggttctgctgctctacaaggaagatgtgcaggttaagctggacaaatagcaggctgagtgcggctgggcttttcccagtctccagggaggactcaggattgagctgcagggcctggtgatcatcccagcctcaaggcaagggcacagctgcgatcctgcttgatctcaccctgctttgtctgcttcctgtggagagctcccgccttgagagtgggaaggaatgtgtgatcatccccattgtacagaagggaagagtgagacccacagtgactaagtgagtacagagagaatgaggaagcagaaaaggaattggattggggtctgggcttctggtccaggctccaccctaacctgctgtgtgattttgtccaaaccttttatcttttctgggtttcttcactcgagtgtgaactttggaccagatcagtgacttccagatcacttttcctaaccacaatgggcacatgttagccctttccatgggcccgggccacttccagtacccctataggggctgtaatgcaaacccttattccttttccagaaagatcatcagaacagagaaccctgagaattgcattgcagggatacccttgcctctgttctaatttatataacaaattccaaagcctttgcactcagtgtttgggaatgaatgacctacagggcacctgggtcactgtcttgagaatctttagctttcctgggttcctcactgaggtgctaagatgccaggatcctgggcatctgagtgtaccctgaggtctggtctcatccactgaggcaggaggcagagctgggcaagcctgggtgtccagcctccatgcccctcactgatcaggggtcactgtggcccctcactctacctgccgcacctttcccagcagatggtagctgggaaagcaagtcaaatgcctgtttcctccggtggacttgggcagatcatgctctgagtgctccccagcccttttccctggatctctgagctggctttctccaaatctccacctccctttctctgcgtctccggtgaatactgccacacagggagcctgctttaccaagccttacttgagtcttgagatgctaatagatcccctgggaatggcaggctggagtggaacctggcatggggaagacagactgcgccagctcccaccagagcacggagcactgcagctctggcaccactgagacccctgatcaaggccatttctacctctaggtggacaagccaggctcaggggcactgctggattgccctgtgggggcctctaggcagcacaaagggcctccctgctgagctcaggctgggaattcttcttgccctaggcccaaaccagcactgatttcagtctgaatgtggtggctgcagtgcagggcccaccgttctgatggaacctaaagtcagaggaagaaggaagaaaatgaccactgattagtacctgaggaggacagtgacctcttcagggatcatctcattcattccttacctcccaacggcactgtgctgcaggcagtactattctatttacaggcacagagactgcaacttggggaggccaagcagttggcccagggtcacacagccggccagaggcagagcagggattctgccaggcctattgctcttcccacttcaccatatcaggggcctaaaccacagtaaagaaagccaggaattggaaccccattggttggtggccctgtttcttccttcctttgcccggggtgggtgacgatgctctttctgcaccactgcacaacttgtcatcccttctaagatcccagccagggcaatgcctactgttcaagaaagagaaccctcatctcccaccagcagaaatcaataatttatgaaatactgctttagccagagcagagagtgatatattataatgcttcttaaaatccaatattaacaagttttctaaagggtgaaaatatttgaattaggggaaatgaatgttttacaagccagcaggggagccatcccctgagatgggcagggggatggccggggaggtgggagagcattggactggggctgggtcaactgtcctgaggctttaagccagaagccaccataactcaaaagggatgtgccctgggcagagtgggtgcagaatcgcattccgcaaagggtcccaaagggcgtttatgctagatgcctgctgggcaatggccaggggtgtcgaagtctaagactattgtggtctttaaattctgcctattgggacctgcccctttagagcagctggtcctccaggcctttctgcccagggggctgcaggcaggatcaccctctgtgctcaactatgttattgttcagcaaatatttactgtcccctcctcactgggcagcttgagtggactgcctgatgatcctacagaccttggcttgggctgatggaatgtggagggcaggcatatgactaagggctcctccaagcagaggccttgagtgagttcatgtggaaagctggggctcttgggctccagtcctgcactctgagaagaggctgtgccccaaggaagtcactgttcctcacacctggatctgggatgagacacccatggggccaagccaggagcagtcaccacagccaacctgcaggcttatgagctcattggtgtaagacactgagatgtagagttgtttgtcataaggcatcgtcacagaaaagtcagcacaccctcccctccccaccacctccatgccctgttggaaaagcatctcctggccgcttatccaggcactttgttgtcaaattcatgccctttgaagggtacctgcttccctgccagacatgctccccgcaaggagagcagaacaagctctccaacttcttccattgtgaaagcccatttatagcatcaaatgttgtctctgccccctaaggttcagtggctatatttttgtagccattgattgggactaggtgtggggaggagcacagtgagaataggcaactatgaatcagttaccctttaaaattgattatgctttaatgtatattttatccaacagaacaacagtttacaaatatttgaaaagcagtatatgaacataaaaggggtagtgtttattccctcactgctgcttacccctcagattcatggactccttgcaatctgagactcatagggactgcggaaagagagtgaattttgttgtgagatcgattacttcccagccacttcaactgcctggatctcagatctcagtttcttcttctgtaaaataagcacatctctgctgcagggttttctgaagtattaaggcgagcacaggaatggtaatatacatggcagacatgggatatactcaacaatcacatctttttaattttgtctctgctgtttattccgccctgtgaccttgggccagatttggagatgactctcagccttagttccttcctctgcaaaatgaggagcatcatacctatctcaggggagacacagagtcctgaacgagaatgcacctggagcacagtcagtgctgaaataattttctccgtcctttcttctctgccagcccctcctgtcttccatggccacatgcaaggcacagcttctccaaacagccttcccaaggcccccactccactcaggagtctcctttaggacaaagctcctctccagaagtgcattcgtcacaagctaaacacccaacagctgatatcagtaacagaggaccgaatcgcagattaattaaagatcctgtttactcgcctgcctccaccgtgtcatgtgctccttcaacctacagccctgcaccttaattgaagagtgtgcagcagttagggacaggctggacttctcaaacttctgccagtttcacacttgcttgcattacccgggacaggccgagccagcctgtccacacctggtggtttaaagtgtggccaggctctcacctaagccacttgattagtcttcacagtggaattagaaatagaatcccaccaaatcagggcaaaacaaggcaggaagagtatttggtgaaagcagggaccacacctttttttaaattttttttccaagcaccaatcttgtatttttcttgccaataactaggccacagtgacctcctgcttcagtctcctggggccaggacaggtactcctcacctctgagcccttgactgtatcctcttgcctcagactttgctctctgctctgaggacagtggcaggatagtaatatgagtaatagttaggaccggctgagcactcagtgaggcacttaaaggcagttctacgtgtagtggtgaagagcaccagttctgaaaagaagttgggcaaggcatggcagctcgtgcttgtaatcccagcattttgggaggccaaggctggaggattgcttgagctcaggagtttgagaccagtctgggcaacatgatgagacccccatctctgaaaaaaaaaaaagtagccaggcatggtggtattcgactgtggtcccagctccttggaagtctgaggtgggaagattgcttgaacccgggagatcaaggctgcagtgagctctgttagcaacactgtactccagcctgggtgacagagagagacccagttaaaaaaaaaaaaaagagagaagatgtacaaatggccaaaaagtacatgcaaaaatgctctcaacatcactaatcatcagggaaatgcaaatgaaaactgctgtgagatatcacctcacacctgttagaatggctattatcaaaaagatgaaagataacaagtgctggagagggtgtggagaaaagtgaacccaggtaaactgttggtgggaatgtaaattagtacagccattatgtaaaacagtatggaagttcctcaaaaaattaaaaatagaactctcatattacccagcaaccccactactgggtatatccaaaggaaatcaaattagtatggcagaggtatttacactaccatatttattgcagcactgttcacaatagccaagatatggaatcaacccaagcatctatccatgaatgaatggataaagaaaatgtgccttatagacacactggaacattatacagccttttaaaagaaggaaatcgtgtcattggcaacaacatggataaacgttatgttaagtgaaataaaccaggcacggaaagaaaatgctgcatgatcacacttatatgtggaatcataaaacgctaaactcatagaagtagagagtcgaatagttgttaccagggactggccaggggcgggggccaggtgcagagaggttggggagatattcgtcaaagaatacaaaatttctgtagatatgaggaataaattcaagagatgtattgtaccactcggtgattatagttaataaccatgtattgcattcttgaaaattgctgaaagtagattttgagtgttcttaccacaaaaaagggtaagtatgtaaagtaatgcatatgttgattagcttaatttagccattccacattgtatacatatttcgaacaacatattttatgaagtaaatgcgtacactctttatctattagaaatataaattaagaaaaaaaaaagaaaaagcataccagttctgattttgggtctggtctctggctgtgtgaccctgaacacatgacctaatctctctaagtctcagttaggaaactcatcagtaaaccagggctgtcacagcaccagctggcagggctgtcatggggactaaaggaagaaatgcttgtagagtgatcggtgcagtgactggcgcatatgaagaacccagtaaatattagacatcattatattttgataagatgacttctgccagtgaccctgtggaatagctgatcttatcccctgttacaagtgaggaaacacagactggggaagttaagtaacttgcccaaggtcacacggcaaataagaggcaccgagcccagctttgcgtgctcatgaccataggaagacactctgcaaatgaagagataaatgcctgcctggatgtccaccacggagccctatctgtgttaggacattcttgcatttccataaagaaatacctgaaaaagaaaaaacaaacaaaaaaccccaaacaacaaagtttaacaaaagaaaaagaaatagggaaaaaagtaaaaaatgaaatacctggggctggttaatctatagagaaaagaggcctaattggctcatggttccacgggctgtacagaaaggatggtgccggcatctgctcagcttctgggacgcctcaggaagcttccaatcatggtagaaggcaaaggggcagctggcatattacatagccagagcaggggcaaggggcaggggagatgccacacacttttaaccagatcttgagagaactcagtcaccatcacaaggacagcaccaagacattcatgagggatccactcccatgacccaaacacctctcagcaggccccacctccaacactggggattgcatttcaatatgagatttggagagaacaaacattcaacctatagcaccgtctcgtgcctactgccttaagtgagtggcagagagtggactgaggccttggggaaagcagtgaaaagactgggatcagagccacacccctcagggttggcgacctgctctgagcttcactgactttaggactttgcagcctgagttcccttgtctgcacagtgggtatgaatgatgcctacctgtggtaaggattatgtgaacgctgggtgcaaagcaacacagcaccattgtttagcaatgtatatgtggcacatagtagatgctcaagaaatgtgaactcctctttcttctccccttaaggttttgaagttggggggtccctcagtcaccccaacaccacccaggctgcctcctactcttctgaaatgccagcccatcaatcctgggcacttctgtggggcctttggtctgtgttcagccatcctgcagcacaggcttgactgtgggtgacactctgccagctcttttctagttctctgggtgaccttggtgaatcacttcttttctatgggactcagtttccctacctgcccataagtggcttgccctggttcaagaccccagacagcacctcttggataggctacatcagcatcatctggaaaaatatttaaaatgctgaatccttgaccccactttctggaggctctgcttcagtggatgggatgggccctgggaacctgtatttttaatgtttgggaaccatcagcctggtctctcagctcccccgcagttcctgtaggctgctcttccaagtgaggaccatgcggcttgcctttgtgtgctcccctcccttgagtggcatgctgcaccccagcctgagctaggtggtcccagcaagggattagggaatgccgatgggaaggaggaatgactttccaagcccaacaggaatcttgccagatgcctcgggacaatcataagctccatgggacctgttcccattttctactagtgatgtggcacttctcagctgggaaaatgcacgctgatgtgggtggatttccttctccttttgcccccagacctgcctccacacacacgggtgtgagcatacacacacacactaacattcacacacacaccaaggaatctgatctgagggattgtcctggccttggccttgtctgctctttgaaacagccggatgtatggaagttgctggggggtggggtgggaggagggggcagcttaactgtctcatttgtttcagtggctgtggcttcatctacccgccagcggatgttggagggggtctcttccagagggtagtggtgaagcccaggagggttccaggaactccctccatgggaaatgcatgctttgtttgtttgtttgttttgtttgtttgtttttagaaggagtctcactctgtcgcacaggctggagagcagtggcgtgatctcggctcactgcaacctcagcttcccaggttcaagcgattctcctgcctcagcctcccaagtagctgagactacaggcaagagccatcacacccggctaatttttgtatttttagtagagatggggttttaccatgttggcgaggctggtctcgaactcctgacctcaagtgatccgcccgcctcggcctcccgaagtgctgaaattataggccactgcgcctggccggttttttttcgagagtggtggggatggatcatcagagtgggctttgaaatgaggccagcagcaaagaatcaacaagaaatgaggatccaccgtgccaggaaagctcagggagactgcaggaagaactgggttttgttgcttttaaatgatttcatttgttagaacaaaatctaaaacctacaaaagggtatcctgtggaaagtgtccttttctttccagacacacagccccaccccacattagccaccgttccactttctcacagatcctttcagagacagcctgtgtcgataaatgcatatgtgtgaaaattacttttattttcctggaacaggtaacacagttacacaccatgcatatactttgtgggttttttttttttggctccttgattttttcacttatcctgaagatctttcagcacacagagagagttgcaacagtttttatttatttatttatttagagacagggtctcaccctgttgcccaggctggagtgcaatggcgcgatctcggctcactgcaatctctgcctcctgggctcacacgatcctcctgcttcagtttcctgagtagctgggactacaggcatgagccaccacacccagctaatttttgtatatatatatatacatatatatatatacacatatacatatatatatacatatacatatatatgtgtgtatatatatatgtatatatgtgtatatatatatatatgtatatatgtatatatatatatgtatatatgtatatatatatatatatatatattttttttttttttttgtagagatggggttttgccatgttgctcaggttggtctcaaactcctgagctcaagcgatctgtccatctcggcctcccaaagtgctgggattacaggcgtgagccattgcacctagcctagtagccacagtttttaaacagttgcttgtattctattttacagataattcatttagtcaattcctcccttagccatttatcttgtttttcaagagatgcttcaatacaacagccctgcatatacacccttttacatttaatctgtgggataaataactaggaggagaatttctgggtcagagggcatatacatgtttaattctgatagagccaacttaccttcttcagagattgtactaatttacactctcaccagcaatgtatgaggatatgttactttgctgatttgacaggtgaaaaaacactatccccttgtagcataatttgcatttcttttatgagtgaggttgaacgttttttcacctgtttaaaaaccactagttcttctttgtgaactcttcttctccttctcctccttctcctcctcctcattctcctcttccttctcctcctcctcctctgcctccttcttcttcttcttttttgcttcttgtgaggtttttccttttttttttttttttttaagacagggtctcactctattgcccaggctggagtgcagtggcatgatctcagctcactgcaacctctgcctcccaggctcaagcaatcctcccacctcagcctcctgagtagctgggactacagacagtgccaccaaacctggctaatttttgtattttttgtagagacagggttttgccatgttgcccaggctggtctcagactcctaggctcaagcaatccacccaccttggcctcccaaagtgctaggattataggcatgagccaccataccacactgtgaactgttcttatggctctggaggaatcttcatatatatatatataaaactaaaccctttccctgttcaaagagatgccagtttgttgtttgcttatgatatttttcccctggaggaaatatgacttttatatagtcaaatttgtcaactttttctttatgctttctaggttttgtaccctattttttaaaggtctttccatctccatttaatttttaaaatctctcggtagtatttttatgactcatttatatatttaagactttaaagcatctgagatttagataaggtacaatgtttgggcaagtgcttcgtatgttttcaagtattttttctttaatgccaattagttacgaaattcagccccataaaaattctttggggcatgcaaatgagattgcatttgctctagtttttgggtaaagagaggctttttttagagcaactttgttttccagataactactgagttgttcaatttttaaaatacgtaatccatcgtatccccagtgatttgaaacacattctttaccacataccagattggtgtttctttctggtttcattctatactttttttttctgttccattgatctatctactcgtgttgttttaattgccatttctttatactgttttaaatatctggtaggtctgggccccctcactattcttttttagaatatgcctattcttgcttggttatttttctctataaactttagaatgggctttactaattccaaaaaggaagaaccggtacagctggtgtgggtgagcaggggatgccacctgcctcctctggtcctggtatgcagagtccagcagaaagaatgatgtcatgctgcacagttacaggtggctcaggaatgttctcctttctctcctgcttaatcaaggagggcttcagtggaaaaggcagagaggggaagaagaagcaagagaaaaaggagaggtggaagagaattttgaagcaaggaagaagaggcttcctggcagaaaggactgaagacactctgggggagaagagacagagagagatgaagcatcagaaatcaaggctgcagggagggttccttgcggagattggaaaatggtgggtgggagaggaggtggaggccagctggaaggcttgagcctaaggcaggttgggggtggcctggaactgatggaagatgtggttagagggagtcagtctgcctctgagtcatgcgcataggacttcagtcagcaagctgccctggctgagtggaagacagacagaaatggaatgaaagccagaaactccaactgtcttctcaggctggccaccagaggtgcagtctcatgttccttctggttacaaatgatccctacctcccaggaaaccacagtgtggggttttgaatagactgctgtgcatttactcatggagaggagtcggaagctaattttgagagtgtatgaagtagttttacatcctgggctacaacagaagcatatcctggcacaggggtgttgtggctgtgtttcattaggagctgtaattctccagaccaaagaaagtggcagggagctcagccctgggaacagtgggcacagagtcaggggatgcccaggataggggcgatgctggcactgcggaaggaagctaggcctgcaggagcccgagtttgggccacattcagccttgtcagggttgcaagaaagggtggatgatgagtgcacgggcaaaaatgggcctgcgggttctctgtcaagagcttcactcgcttccagctagagcccctggcaaatgacttctcacaccaggaagacacccctgtgggaagacactcccagacccagcaggcccacgtgctccgcaaacggaccctgtgccacagtttttctctgctgcagtgcccggcttcagagcccccgtacagggtggctgggaagacctcttccctgtgcccccgctcaagctggctcttctctctgctgtcttctgggctgggctgaccgggaaacaggatactgctttgcctgccctattggcctaaaaacgtttccttcctctgcaattagaatcatggaatatcaccggatccaattccctctgaaatttctccctgaaatttcaaagctcagaaagggcacccgagggtcccacagccacacgaagttctaggtgtgacctgcgtcaaagaaccaaatttcaacaagttgagtttagtaagtttaataataaggcccaatgacactgtcatctaattgacttttattagggatttatgaatcaggcagtattccatctaggaaatgtctagaaaggtgctccaccccattggcagaacagttgtttgagatttgttgttgttattttgctttgttttgagacagggcctcactctgtcacccaggatgaagtgcagtggcacaattatgcctcactacagcagcctcgaactcctgggctcaagtgatcctcccacctcagcctcctgagtagctgagactataggcgcacatcaccatgcccagccaattttaaatttttttcttttatagagccagggtctcactacattacctaggctagtctcaaaactcctggcttcaagcaatcttcctgccttggcttctcaacgtgctgggattacaggcatgagccactgcacctggccaaggacagttggtttttgtatggtaacttgagcaggaacaagaaaacagcatagtacaaaaaagaagattggttaacattaggttacttcaggttactttcctcgtaagggttaatgcagagactttcttcttcagccaactaaaactggcctgtttggggatttggctaccatctctctcctgatttcttggaaggtcagatctcataagtaaacaacttaggtttcggtttggtcatgtaaccttagcatgagtgactccattttgggttgagctattagagcctagtgcaggagcttagtccaaatcaatgccctcccatacattttatttaacaccagaatccaggtcattggcttctagccactggtctgtcacctagtctaggtctcctcctgtgtaccacagggcacattcagtatcccaccagggtgtggaagtcgtcttccttccagagagtcaggaaaccttgcttttaatgagctcaggggccagcatcttgagggcctgcgtttattttcagttagagcggatggaatgttgtttgtggtttgcttttttaatacaaaatgggctgtggaaatgaagctgcctatacaactctgtagggagctggccggctttagcagaaaatgttcttgccggggacccgagacttaagctctatctggaagttccttccctgctcttggcctcaatttccattctgtagatggagaaggttggattgaggagtgtctgaaggcccttctggctctgacttgctttgcttttgtgaaagggctataaggcccttgtcaccgtccccagcaccacagtggagacggggtgagaccctccaaagtcttttcccacagatggagttggcatgatttgtatgaagcactctcaggcctccccaggggggccactcctgtgccttctgctcagcaggtcttcatggggtggggctgacagtctactctcctggcacttcacacacagctcatctttagaaggacagtggctttagacagtctccctgggacccagcctgaggccactgtccagcagggggagagacagcccagagatggaagcagccgggagagcaaaacactcctcaccaccaggctggcccagctgggctcttcctggcccagcgctgccctccatcgtccgtgtagcggtggagcccccagtaaaagcacttgctttcaaagtgcctcagagggaaaaatacaacacttcacgacattagaaacgtgagaatggtcacaagtacatgaaagccgtgatgtaagtcgtgaaataaaagtccaagttctatatgtgttgaaatagtatttaaaaaagaaaaaaccagccaggcgtggtggctcacacctgtaatcccagccctttgggaggcagaggcaggaggatcgcttgaacccaggagttcaagaccagcctgggcagcatgtgagaccccatctctacaacacaatttaaaaatcagccaggcgtggtggcgtgcacatgtggtcccagctgttcaggaggttgaagtgggagaattgcttgagcctgggagttccaggctgcagtaagccatgattgtgccactgcactccagcctgggtgacagagtgaaaactgtctcatgaaaaaataaaaaggaaaaaaccaaattaggaaaaactgtaaccctgcagcagcgtaaaacaggtgacaatgacacttctattacatcacctgtgacagaccccttatccttcatggattttggttcatgccagtgtgttgtagagttttgcatctgactccctctcagtaatcagctggggattttccttggtgtattagttagtataagccaggctgttgtcacaaaccacctaacaaaaactcagaagatagaagttgaattctctttcctctaatcaggtggatatttcaagtcagtgggtgacttcactcacacagaagaacagggatccagattccttctgtggtgtggctctgttgacccctagtttaggtgtccatggaggcatacccgctgtcttagggcttatcttagtccattcatgctgctgtacaaaaataccttagactgggtagcttataaacaacagaaatttattgctcacagttctagaagctgggaagttcaagatcaaggtggcagcagattcggtgcctggtaaggtctcactctccgcctcatagatggcaccttctcgctggctttgcatggtggaatggtggaagaagggaacaagctcccttgggcctcttttataagggcattaattccttaaaaaaggtggagccctcatcacctaatcgtcttccacagtccccaactcttaatactattgtattggggatcaggtatcaacacaattctggggaaacatgaacattcaggccagggttccagcctggaagtgagcaccctttttgctcacattctgttgatgagaacttagggctgtggtcacatctaactgccacggaggctgactaatgtggttcttagccaggttcgcacatgctcaaatccaactgtattactgaggaagaaagagaatatataatttcataaattaccagcagtctctgtagctttcaaaactatgtcaacccaaaagtttgtatttttcctctgccagtcccttcttgtgacaatgtctttttagcagcatttctccactatttaccatctctccctcactcttctttcccctccttctttctttccctcaacacacccctcactctcactgttttacctcttccctcactgagtacagaatccctaggataaacaggatggagtttccaagttccatgggtcaggacacaccagactgggttatggataaggacaatggtatacattcctgccttctttgcctacactagcccatgagcacttcacccatgctaagccatcttcggcccaaatggcccttgagcatgcatttgaaaaacaggtggaagataaaacaagaagcatgcattggttttgcaggtggaagacctagatttcatgtcctgccagttactaattgtgtggtcctgagtaggtctcctcacttctgctctgagtatctcttcattgaaaaaatggagcaaatgcaatttcacctgcaaaccccagagtttttatgaggctgaagcaggataatgtttggcaagagctttttatattttcaagtatttttctttaatttaagcatatttattttatagtctgaattttataatttcaatagctgaggtcttctgaaggtctaattctgctgtttgttttatctgctgatttttcactcaaggtggtttattttatcgtgtaccttgtaattgtaggttgtgagctcatattcacaacctctctctgtgagaatcctgttaagtatgacttaaaagcgtcagcttcagggctgggcgtagtggctcatgcctgtaatcccagcactttgggaggctgagatgggcagatcacttgaggtcaggagtttgagaccagcctgggtaatatggtgaaaccccatctctaccaaacatacaaaaaaaattagccaggagtggtggcacatgcctgtagtcccagctacttgggaggctgaggcagaaggattgcttgagcctgggagaaggaggttgcagtgagctgagatcatgccagtgcattccagcctgggctacagagccactctgtcttaaaaaaaaaaaaaaagtgtcagcttcaaagaggattaacattaacactcctgagtgctaccaacctgatcccactttgtaagtaaatttctcagtttggagttttccaaatcacatatgcagtctaccttaaaaccccaaccctcagaggagaagagcctatgactctatgattccaaattctcagtgaaggctggtttttttcaactcagagcccagatcaagacagacatatttccttcagtccctctttgctgatgagtctacttttccctccaaatgtaacctttcaaggatctagattttatgctgtggtctcacttccaccttctcacattgcttgagtccccatgtggactttaaaattcaagactctgtgaagtaactgagctaatgcctcaaggggagctttcaccctcagtgtcatcttagcattcttacttcctgttctcttctcatttgggacccctgaagattgccatcattttcctgtgagtttagcgctcacaagaagggtgtttgttgtattttgtccagcatttctaggtgttgtgcagtgggagggcttctcaggatggccaatggactctgaaatctcactgtctttcatgcgttctttaattcctttttctaatttttcccttttcctctcttgtccttcctgtctcttgctccttctctccacatttatctgccggatctcagctgctggcactgtgtgttctcaggggatactctgtcaggtgtttttcaaggctcctggctgaccctccccagcttctccctttggttctctagctccagacccctaacatggccactaaacacccccagcaggcaccccactgccccagatctgtgccgttgggctttatcttccgtgcaaacttgtcagcatccctttttattcatccagagctcttcattccatcactattcaacttgtcaaaatgtgctcagccaggaacaagtttaggtcagagattttaataatctcttcagagctttcctcttttgaatcattgtgaatattatgcatcagaaaaactccagattttgagcctcagactgggaggcacaattaggtgctcagagaggccagaatttggccaacttctcattccccaaatggactcaaggaatatgagagaattctgaatgagagagcaggcaaaattacccaagagggaatgaggctctttggctctaatttgagggtcatttttcttcttgctggcacttctcttccccctggattgggccccaagaccattcaagcaggcttctaagaaggattcactgaagtgatttccctagaggattgacagggactttgaaatgtgctgcctcttttagagactttgcctggtaagaggaggcaaaaccttaaaccaaaaggacaaggaaaaggaaatcaaacattggggatcgggggcctccttcccaaggctactagaaggctgcctctggatactccagtgtagaggcactgtgacccccgcccacttcctctgcagtgtctcatctgatgctcatgaccaccctgttgacatcatgtagctcatgttttgtgggaaacaggctgagcaaggcaacagaggtcctgtattggctaagtgctgagcctcatttagactccaagccggactttgagaaaacctgttgatatggtcaggctttctgtgcgcactcaaatctcatcttgaattgtaatccccgcatgtggagggagggacttgtaatccccacatgtcaagggagggaggtgattggatcatgggggggtttcccccatgctattctcacaatagtgagttctcaggagatcatatggttttataagtgtttgacagtccctcctacatgtgctttcttctctctcttgccaccgtgtgaaggtctttgcttccccttccccttttgccatgattgtaagtttcctgaggtctccccagccatgtggaactgtgagtcaattaaacctctttcctttgtaaattacctagtcttggatatttctttatagccatgtgaaaatggactaatacatctgtcctctacctaccatgcccagtcctctccaggatgccacaagatgggttggaaggccgattactgcaattgtccaggaaagagctgacatctgtacatcacactccaagaggcagcagacacaggggtgaagcccaagggctctagagccagacaggccaagttcaaattccaactgtaccactgaactagctgagcaacattgggcgatgctttactccaaccaccactcctagcctttcctccccggcagcccgtggagactaaaacaccaaccaaatcatttcactcctctggtctcaactttccaacagcttctcatcacttctagaataaaatccaagtgcctcctcaaagccttccaggcctacagcagaggcagccagtgctcaccaaactctacattctcctctttgtcccaggctccctgctgtgccacatttctctgcttctttgcgtgggtggggtgatggtggatgcggagacttatgccttattcttgtcaatggagtgtgagtggaggtgacatgtgttaacccaggtcgaagtggttgagagcagtgtgccttctccacactttccccacatgccagctggatggacatccagtgaggaccctgaggaaatggcagagtcacacagtggaagatgcctggatccccaagtatgcgaatcagaactcctgtacctgtcttgtgacaacactaactgaactactacacaagcaaaaattgattctttattgtgtcacgtcactgaaacttgggttttttttttttttttttacagcagctggcttatcctaacacgaggccctacatcagtcgacctcagtccaaacccatgcctgctcaccctctccctcactgtgccccaccacaccaccttctcgtagctcctcagactccaagctcattcccatctagtgccttggccaggccgtgttccctcctcctggaatgctcttccacaaagctttacatgatgttttttctcagttttgccagatttctggtcaaattttatctcctcagagggagaagccccgactccccttttaggcaggcccaccctcaccaggcatcaccttccctgtgctatttttctccagagaagttatcaatgacttaccagtctatcagaaatatgtctttgttaaaatatttattatatagctcctccctgtgtctgtctatcctggtgtctagaagagtgactggcacatagtaagtcctcaataaatattctctgagtggatcaatgatcactgttttctctgcatctttatccatttctctttcctttttctcctctgtaagttgagtgttgtatgctgaagacaaaaggggataatgcaggttagtgtggaacatcctggcacaacagatgtctgggaactgcagattctgtcctatgtagggatagctccacaagaaagcccaggctagtgtccatgggttgcctgcaccagagcccaggagggtggtttaagcaggaaggttcttgttgctgccctcccaagagagggagtggggctgagccagctgtggagcttggggctggctgccagctgctgaggttgacagccacatggaacttcaccggggcaggtaattgaactagtggagtgggctgaccaagaggaggggagcgttcccagcattggggtgatgagccatggaattggcattggagtggctgtagtcacaagtggaaggaattcatctgctggcacatccagcctgcagggagaggacccaggggcgcctgcacttgtggcctggagggagatggacaacttctggggtgccctctggttgttggagatggagggcattgaaggaggaggggacggcacatgcgaaggcatggagttgtgaaatgagtgcttggcagttagaatggtgaagtgaggtagtgctggtggccctaggatgtaggtggaatcaggacttgaccccagaaaagccacatgtggggaaagggtgagcgctgggctaggagccaggagacctgactttccactcccaggtctaccacgatccatgtatccttgagctcaagtgtatccatgatcctgctcaggtgtttcactgcatgacacacagatgaggaaactgaggcacagagaaagtgatacacagttgcatagtcactttctctgtgcctcagttacctcatctgtcaaactgatgatagttcccctcacatgggggtgaggagaagaagaataaaaagtggatgcctatgcaattttctcctcacaatgttttcagttattatgactgagaggtggccaggaggagctgaggaattcccctaggacttgtgtgttgggagggccaagggccaactggaagtgactgttgctgagaagagagtgggagaaaacagcaggaggaaagccaacgtggagaggtgggggaagggaggagctggaagcagttccagcaggagaccaaatgtgggcagtggcaggagtgttgatgtttcctggcaggtgcagtccagttgctttctatgcctgcagtgtgcaagtggattgggtccttgtgcttgtccgtggaccaagcacaaacattctggttgcatctccatctaggtacacggtaggattgcatcctccatgcttttgaagttctgcctgcccacgtgacttgctttaacaaatgatgtgagtggaagtggtacatgtcacttccgggtggaaggttgaaaagcttgtgcctgattcacctttgaggctgattctgtcagtgtcccttggaccctccctgctgaattctacctgccagtgtctgcatctctgtgcctgagggatttctccaggcccaaaaaagacagctcagcctacatgcactaccagccagaagtgcaggggaattacacattatcaccttcatcagctctcagtcagtgactctggggaattgagacacaaatacccaggctccctcgctccatgctgcaggtgggatcactctgcagtatgtgctcctcactctttccctggggtatcccacgggattaagttcattcacccacagaggtacctggcttcatatgcatcttgtattagctgctttcccttcccagttgcacttttctacttgataccagtgtttcctgcacctcccaaataaacgattgcgctcacactgttgtttctggatcagccatgttcctctttcctgctgtcatgacagtccgttggccaaccaactggcaatttccctgggggtggctactctgtcattccaggccttggggtaaggatgagtaaaagctggtggacttatcatgggcaggtggcatgagtcagaaacccattgaaatttgggggctgcttgttactacagcccaacctcacccaccctgactgatacagcccctggcttctcaccaaacaccaaaatgatgcatctaatttaaggcatcttatgagaaggaaggaaggaaggaagaagggaaaggaaggaaggaaggaaggaaggaaggaaggaaggaaggaaggaaggaaggaaggagacagaagagacagagaacatttgtgagtgtgcatgtgtgtgtgcacactggggcagaatggaagggaagagagggacaagtttgaagggaagactgggacaggaaaagaggtgcccaagaacccactggagaggagacttagaaaggataaaagaacaagaggcccagatatacagtgagaagaatcccaggtcacacagcaagtcaggggttgaattaagcctaggacttgggcttcccaacttccaatctagcgctctttcctctgagctcacttcctccagaaggcccatggctggaatgtcccttctttcaagctccctgggattgtagaaagaagcacacagcccatggttcatgggaccctaattacctctagctgccaccttgttctcacatctggatgacagaggcacatctgtatcacactgggctacaggctggcctctgaagggtccatgggaatgaaagttaaggttcttttgcttgaaagcaacacagataaactttagccagctcaagccacaagaggggatgaactggagagtgtattaggccattctttgtgttgctataaataaatacctgaggctgagtaatttataaagaaaagaggtttggttgacttgtggttcttctggctgtacaaacatagccccagcatctgttcagcttctggggaggcctcagggaactttcattcatggcagaaagcaaagcagaagtaggcacatcatagggcaaaagcaggagcaagagggagagtggattgtagggtgtgccacacattcaaacaaccagatctaatgagcactcactcactatcacaaggacaataccaggccatgagcaatctgcccccatgacccaaatacctctcaccagaccccaccttcaacattgggaattacaattcaacatgagatttggcagggccatatattcaaactatatcagggagagactatggcttttagctaacaacataggccttgggaggaagagcaacagaagcagctctggaaaccatggtgctcttgtttgctcactgtacagataaaaccaatccactgagacagcagtaccgcagtagagaaagagtttaataatcacagggctagttaagtggaaggatgggagtttattactcaaatcaccctccccaaaagctcaaaggttagggtttttcaaagatagtttggcagtcaaggggctagggaatgggggatgctgattggttgggccagggatgaaattacagagggttgaagctgtcttcttgtgttgagtcagttcctgggtggaagtcacagaagcagttgaattagttccttggtatgagttatgggcccaggtgaagtcagtctgttactagaatgcaaaagtccaaaaaatatctcaaagaccaatctttcatttttacaatagtgatgtcatctatcagagcaattggggaatttacaaatattgtgatctctggagcagtaaatgattacagaaattcaagctagggaacaatggctggttatcatttaactacacctgcatcttagcagaattcaggcctctcctatgatcctaatcttgtggactttcattagtcttacaaaggcagttttgtttttttttgttttttgagacgacgttttgctctgttgcccaggctagagtgcagtggcactatctcggctcactacaacttctgcctcctgggttcaagtgattcttctgcctcagcctctggagtagctagaattacaggcatgcaccaccatgtccagctaatttttgtatttttagcagagacaaggtttcaccatgttggccaggctagtctggaactcctgacctcaagtaatccatctgcctcggcctcccaaagtgctgggattacaggcgtgagccgccatacacagccttacagaggcagttttggtcatcaagcaagaagggggttagttttgggaagggattgttatcatctctgttttaaagttaacaaaggcagttagcttgtgaagttggagtcagttagcttagatttctctcactgatgcactttttgtaaaggtggtttcaccctgtgcccatggaccttccttccaggggtcaccatttatgcctctcacctgctatgtctctcaggttaaaagttcacattcctaggagaaaagaatctgactggcaagcttcagtcagatgctctttggtccagtgagctaagccccggggttttagctgggacccatggttgaggatggccagttcctggagaatgggagagggcactgtgtgtgaggcagacaatggggagtcatgtttgtgaatggagtcttctgccagtgactcatatctcctctcagaaggtcctcctcttcctttttccagacagcagggttttctgtcacttgattcaacccttactgaggctgtaattgatgtctcacaggtaccggcctctgtggaggattctgagatgaagacagtcctcacacccctgtgaagacgagtgagttcaccaagcacagccacgcaaggttgaggggcctggagccctgggagagcctggctgtgggggggtctgtcgctgccagctctgcctcttggtctctccacccagacgggagatgatcaggactgaccaaactgagccacccaacacagtctcttgtggacagggaaggcttcagctttgccaagaattccagagctggattttattgactcatcatacttgagattatgtcagtggagtcctttctggagagggaggcctgccctttgacctagctgtagaattgccccagcattcccttagctcaatccctcccctgacccccacgcccttgggactctctgtggctgtctctaggccaaaatatcctcccactgttcaggaggggcctggccagagactctgttgttattttcacacctgttcttataacaatccctgcggaagaaaagaaaaatgtcacctagataaagacaaaaagcataaaaaagaaaaaagaaaaaaaaagagtgacatttggaaaagtttagacaggaatggcctggccggggctgaaattgggaggagggagaaggtcagaggctgggggattagggacatctgagtgctgacttggaaacaggggactctgggtttctctttcataaggaccaaaggctgctcatatatgctaagcacctttcattcattgtctcaccaacaaccataggaggcagttactattattaactcagatagaaatagggaaactgaggttcagggaggttaagtaatttcccagggtctcatattcagcctggacaccgtctcatatctggctctaaatagtagcctctaaggctcattggattggcacttgcctcccaggacccctgtggttatgagattcagagtcctgagatgtctgagctggtcaaaagctttgggtaatctttaaataagcagctgtgccttgctaagagaatgggaggctcctggagaatagggtggccaactagaaagaaactagcttggaagtaagaaatgactgggtcccataccaagcctgcctcttattaccatgttacctcgaacaactgactttacttgtgtgagcctcagttttctcctctgaaaaatggactaataacatttacactggagtgtgctatccagtgcagctcaggtgctccataagtgaaaagatggttcctaccttattgcttccttgggatcttcctccccagcacgtaggctttcagagcctcagtaccatctctgatgacttttttgccagggctcatcagatggggtagaactttctgatcaggaacccacagcgcacacacacacacaagcctcccctcatcctgcgtacagagccagctttgctcgggcttctgggaaaggggagtatggggattacttattgactccagtatccaaaccactggctggacaagaatgcagccagcctcaggaatgacttaaaccagggactctggggccaccaggcatccctcctactgcctggttctctaggtgtcagctccctgcttagttagatagcttctcccgtgctgctggtccaaggcctaatactctcagtttcatcacagtagacaaaactccaattccagttacaaccaaccaaccaaccaataggagaagactccaattggctaggcttgaattacccatcaccttctcaaccaattattgaaactcagaggtagaaaggtactatgattggtcagggctggatcaggtgatcacacccaggccaataattgttccaaaatggccactttacatttagatcgcctaactagaatgggaatgcacagtgctttgcagaaaacagtggtgaaagttcatgactggcccgggcaactgatatggttaggctttgtgtccccacccaaatctcatcttgaattataatctccataatccccacatgtcgagggagagaccaggtggagataattgaatcatgggggcaattcccccatgctgttctcgtgatagtgagtgagctctcacaagatctgatggttttataagggcctcttcccacttcgcttggcacttctccttcctgctgccttgtgaagaaggtgccttgcttctccttcaccttccaccatgattgtaagtttgccaaggcttccccagctgtgcagaaccgtgagtcaattaaacctctttcctttataaattacccagtcttgggcagttctttatagcagtatgaaaacagactaatacagcaacatagtgagatgtcatctctaacaaatttaattaatttttaaagtggtgaaacgtcctaggcaaatgaataaatatcttttacctttcaaatctcaattctctttctttctaatcattcccatccaatcctggagcactacactactgatatcttcattctgccatttcctgtcccctaccctggtgtttaaatctctccactctacctattgggcacagctggcctgatgaatcaacccagcctgcaggcctgatggattttcagagttcaaggaagttcttccttttccagccatcttaaatgtcttcctacctctgcctgctgtatcagcaatttcactattggtggttcattttttagcttactatgacttgttcccattaaaatgcacatccctttgtgagtatgcactcactgtctgaacaattatttatgattagtattagtgctttatcagcttttttacattttggtgggggaaaggaggagagactacagagggcttactcgtgttggagggaggaagagaggctgtagaacctggaagccaattctcctgattcaatgagtctgtttcaggtaagtccaggtgattgtcgggaagccatggccattcttattttatcttggagaagcagcagcgttttatcttttttctgtcttcaaagtttaaattttcttacctaaaattttaaattttgaggtaattggggaatcctctactcagtttcccatgatagcaacttgcaaaactataatattacaaccaagatattgatgttaacacagtcaggatacagaacgtttctatcaccatgaggatcttcatgttgcccttttatagccatatctacttccctcccatccctatcttctccttaactgatggcaaccactgatctgttatccatttccataatgttgtcatttccagaatgttatataaatggaatcatatgtaactttgggggattggcttttctcactcagcataattctctggagattcatccaggttgttttgtgtatcagtagttctttctgactgtattaatccattctcacactgctataaagctactacccgagactgggtaatttataaacaaatgaggtttaattgactcacagttccacatggctggggaggcctcaggaaacttacaatcttggcagaagggggagcaggcacatattacacggcagcaggtgagagacagtgagcaagtgcagggaaaactgtcttataaaaccattagatctcgtgagaactcactatcatgagagaagcataggggaaactgtccctgtgatccaatcacctcctaccagttctcttcctcaatacctcgggattacaatttaagatgaaatttggatggggacacaaagcctaacagtgtcactgagtattagatcatggtaggatataccccagtttatttaatcatttctgtgttgaaggacaagtggatcattttcagtctggggctaatacaaataaataaagcatctataaacatttatatacaagtcttcatttctctgggataaatgcccagaagtacaattgctgggttgtacagtagttgtatgtttagtttttgaaagaaactgccaaactgttttccacggtgcctgtaccattttacattcccaccagcaatgtatgagtgactcagtttctctgaatccttgtcagcatttagtattattactgttttatgttagccatcctgataggtacatagtgattctcattgtgattgtaacttgcattcccttaatgatgaacaatgagcatctttttatgtgctatttgccatatgatgtcttctttggtgaaatatgtctttatgtctcttacctattttctaattggattgttcgttttctgactgctgagttttgagtgttctttatatattctacatactagttctttgttggatatatggtttgcaaatatttttcccagtatgtagctttttttcatctttttaatgctttttaatgggcctttcacaaaacagaagcttttgtgatgaagtccaatttattaatttttccttttatgggtgatgctttgggtgttgaacctaagaactctttgcatagacctacatcctgaagacttcctcctgttttttcagaagttttatagttttatgttctacatttaagttaatgatccattttgagttaattttagtataaggcgtacgtaagacttagaggctttttttttttttagcaccatttgttgaaaaggctattttcctccattgaattagttttgtacgtttgtcaaaaattagttgggcatatttgtgtgggtctatttctggtttctccattctgttccattgatgtatatctctctgccaataacatacagtcttgtaagttatcttgtatcttgtatgccaataacattcagtcttactgtagctatacagtgattactgtagcttgatatgagatggactgattcctcccaatttattcttttttttttccaaaattgctattcctatggtttggatgtttgtctcatctaaatctcatgttgaaatttaattctcaatgttggaggtggggcctaatgggtgttttggtcatagaggtggatctctcatgaatagattaatggccttctctggagtgagtgagttctcattcaattaattcctgtgagagctggttgttaaaagagcctagcacaccctccttttcctcctctctctcacaatgccatctctgcacactctggctcccttttgccttctgctatgagcagaagtagcctgaggccctcgtcggatgcagatgcctaatcttgaacttgtagccatgagaatcatgagccaaataaaccatttttctttaaaaattacccagcctctagtatttctttatagcaacacaaaacagactaagatagctattctagttcctttgtctttccacataaattttagagtaatattgtgtatagctacaaaaacttttgcaagattttaaaaggaattgcattaaactcatatatccttttgcggagtaagtcaacatctttactatgttgaatctttcaatccatgaacataatacatctctccatttatttagctgttctttgacttgtttaatcttctttttgtagttttcagcatacaaatcctgtagatttacacttaagtatctcttctttttctttttgtagttgcacatggtattgtatttttaattttgatatccaggtgttcatttctagtacataggaatacaacagatttttgtatgtttatctcgtattctgtgaccttgctgaattcacttactagtactaatattttgtatatcccttgggaacttctacaaaagcaatcatgttcttttcaaataggaacagtttttatttcttcctttttaatctgtatgccttttaatttcttgccttattgcactggctaaaactttcacagcactatgtcatataaaagtggtgacagcagacatttttgctttgttttcatctaaggcaaaagcattcagtctttcaccattaagtataatgttagctgtagggttctcgttgatgcttttcatcaagttgagaaagttctattccaatttttctttgaattttataatggatgagtattgaattgttgtttaatgggtgttgacttttcagcatcaattgatataatcatgttaatgtggtggacaactggtaaatggataaacaaactgagcagccatttatacattgtatggatgtaccagtttatttatccatttaccagctgaaggacatttggggagttccctgtttttggtgattataaatgaagtctgtataaacattcacaaacaggtctttgtatgtaaatggttttcgtttcccttgggaaacgaaatgctactcaaatacctatgactggcattgctaatttgtatggtgagtacatgttcaactttataagaaactgccaaattgttttcaaaactgtgcgtcattttgcattaccaagcaatgtgtgcgagttccagctttgttcagctggtacttgatattgtacctcagactttcagagcccttctttctatctctgctgtctccccttcctgagtgccagagaagagtgggtatagtcacaatagcaattttccagaagcagaagggctggctctcataattcccctgcacactacgaacttcagaactgcagtttttgggaaggtgtgacaagtgtgttgagcagaatcaggacaagggccaaggcagaaggagtagtgggggcacagggttggcagtgaagggtccaagtggcagcagtccacagtggcaggacctggaacacttcgtctgctcagggcttgttggtagtgggaaaggatcacttggggcccaggagggggtcctgctgcctcagcaccctccctctgccctcctaaggtttccagccatttctaacagaggaaactgcaatctcttgagattcctgcaggccccagggagggggagagttgcctgagaaccagaggcctggcttggggcccagttatgtgacacctgaatcttggggagagtggctgtgggaccaggcccctggggcctcctgggacagttgggaacagggaggggcagctcaggtttcctcactgcttggtgtgtgacctgggctccacccaggcagcagaataatgccaggccttagcccctgcggtgtaacacctttcaccaagaaattgctgtcccgctcctgttccacagggactgctctggcctggactttgggtcctgtggcctagaagtaaagggaccagatcttagtcaggcctcaggacagaagccgagccagtcaaatctggaggaggtgcgtgaggtgtgtgtgtgtatctgcggggtggggagaggtgtcatgtggggaccaggagctgcccaatattcagtttcagttgattagctgtgtggccttggacaagtaatttagcctttttaggcctgggtttgcctgtttttgacttaaaggtttggactagatgggtgatttctcaattgcattgaatgtcagcattacctgggacttgtttttataaactacagatccctgggctccaccacaaacctattgaatcagcatctgtgggcctggggtcctggcttctggctgtgtaacgggctccagccggtttttatatggccagtgtgtcactgatatctccagacccacttacctaaaagttcaccaagtccagcagcctagggcaacctctggtggaagacagaaaggcaggtccaggaaggagggaggagccagagaaggggagccaatcaggggtcagaaagatggggggaggaacctgagaaagggagccaatcagtggccaggaaggtgagaggaggagccactcagtggcctgaaaggaggaagaggagccagagagggagaaccaatcaggaaaagaggatgcggcaggctgggattcttcttgcaagggaacctgaagctttagtctgggcaggcagcgagctggactggtatcagaggaaaagaagtctctactttggctgcttctgtttgagtgtgtctcccagcaccataaggcaggtagagagggcatcacctttgtggttcaggagaagggttagcacatcccttgtctgtttggaggctcaaagtgggtctaggagaaactatatctgcctagagggaaaacatatcctgcaaaccctaaatagccatggggaataaatagcacttgggccccggccattccaccccctctgtgtctgactcagcttggaggacaaaagagtccccatctgctgcttactggctttgcgtgtgtgagcaagtcactcaacctttctgactctgttgcctcctctgtaaaatgggaataataattatacctgccctacccccacaaggcattgctctgggcatcacctaagacaagggaggcgagggtgctccatcaactgcagcatgctgtgcaatccattggggctaggcactaccagaaccccagggaggaagggatggatggacaaccctcccttgtcccacagttggagcatctgtgcttaaaagaaaaccactcgagtgattatcttttataaattgttagatggtcacagataatcttccctctgacaacccacctcagtttcagaggcaacaagtactatatgaatttggtgtgatcctttcacacttaaaaattttttttcacatatatgcgtgggctcatgggaaatatatattgtgtgtcagcacgtgtgtgtgtatgtgtggcttgttttacacagagggtggcgcagttacatatcacacagcaaaatgccttttttaaactcaaggttgtatgtttgagatctaattaggtcatttcttttatctgccatgtactgttctaccttgagtctctctcacatggcatctgttttgcctgatgttaaaattgttatggcgctaaatcatgtcttttcttacccctggcacagccagatgggctgcctttggttgcaagcccagcagagtcagaaagaaactaaggctgtcaaggaaacctaagggtaggtcttcaactctgggcccggaaggagcatcacctccacctggccttgtctggttcatttacagcctgcaggaaggagaggcggggagacggggagatgggagaaggagggagagagagagagagagagaatgtgaatatgagaacgctgccctgctccaagctcacctcgcacctctgtctggggaaagtggaatgggaagaagcaggtggcatccccatcatcccaaggtgccctgctgccaacaagaccttgggtgtccatccttctagtgcagtagcaccaccaccgccaccccccttcaggtgaaggttgctaactttgaaatcaggatgggctacataatttgcagagcccagtgcacataaaaatgcagggcacttcttcaagaaatattaagaatgcattaggccaaaggcagactccttctaagcatgtggctctgcctgactgcacaggtggcattcccatgaagctggtcctgcctgaaactatcctctaagggagtcctgttaaggtgtgggagaaagtgcgcaaagctctgcaaagggaaatagctgtcattttggaagccatcaggatcttttagtgcagtcaagctgaaccatggaggtcatgatgactaacagttccagacaggttgaaaagctctgatttgtcccctctagggtgggaactaaggactggagaggctgcagagccagcagataactcagaaggccagggtacaaatcctccctctgtccctgaggagctgaatgaccatgagtttgttgcttagcttctctgtgcctcagtttccttattaagataaggtgccctcttcataggattgcttggaagattaaccctaaaactatggagaagctgaggacatttcctggcatataatgttcgataatctgggctgatgttagatatcctttctgtgagctttggtttctttcctaggataatataatggggaaaggtagaaggtaaagatggatctagagtcaggagttctgggttctctgctactaaccacctgcttaccaaggcaggtcactgtccccttaagagtctcacttctaaaatttaagggagggggtgaggtatgactttccttccagctttataattctgtttccaaggaattccacctgttcctctcattggtttatcccagtgtacccagtgtattagtctgctttcatgctgctgataaagaaatacccgagaccgggcaatttacaaaagaaagaggtttaattggacttacagttctatgtggctggggaagcctcacaatcattgtggaaggcaaggaggagcaagtcacatcttacgtggatggtggcagacaaacagagtgagcttatgcaggcaaactcccatgttttaaaaccatcagatctcatgagagtcattcactatcatgagaacagcacaggaaagacccgcccccataattcaatcacctcccaccgggttcctcccatgacacgtgggaattgtgggagttacaattcaagatgagatttgggtggggacacagccaaaccatatcacccgacatttattttctctgaggtttaagaaatttctccgcttatctgactgcaaatctttctcattagttaaagtccacttcttttcctgccctttgtgtgaaaacaactggttggtgacccattttacagactcagaaactgaggcacattgagaaccatctgctctccaggtggaacaaccccagtccctttaatatgcccttgcattggcccttcactgcactgtgacctctgcccactgcacatcccaggaatgtccaccactcctgcatttagagacccacacaggtcactcctgccagccaggcacagggctcggcccctcagatctgtctaatattctcagtgcctgtagggaagcagatcttgttacatatcttgttttccagctagagaagcgggctcctggagcccagactgagggtggagtgaggttcctgtaggtaacttgtgagaccccctaatgctgtgaggcagagccccagaccctgcgaccctgtgggggtcagcctttcctggagaaaagctttctcccagcacttaccaagcctctctccctgcagctggcatgagggatgttgctcctctgccaaacccacactctggggtgaacacagctctgggcatgccagctgctgccctggcccctttactgccactcaggaagacacacgtgagtgccattcagtgccagtgtccttgtcagggggcaagcctcaaacctgtccccttcctaccaggcccctgatcagctccagcactagcacaatgcagaatcaatatctatttggggggattattgaatgtccatctcctccactaaaataacctctttgggtggtgtgttggggcgggggcatgacttgttcacggaaatatgcccagagtctaacacacttcctggcacaaggaggtgctcagtacacattcaatgtgtgagcacatggatctgctgtgatttatttattttttaaactttatttatttatttgtattttgagacagggtctcactctgccacccaggcagaagtgcagtggcacaatcatggctcactgcagcctcaacctcctgggctcaagagatcctcccacctcagcctcccaaggtagctgagaccacaggtatgtgccaccacgcccagctaatttttgactttttgtagagacggagcctaggctggtcttgaactcttgggctcaagtgcttcttctgccttggcttcccaaagtgttgggattacaggtgtgagccaccatgcctggccccactgtgatttattgaaagtcaacctctggcccaggcatggtggctcatgactgtaatcctagcactttgggaggccgaggtgggtggataacctgaggtcaggagtttgaaaccagcctggccaacatggtgaaaccctgtcaccacaaaaaatacaaaaattagctgggtgtggtggtgcacacctggaatctaagctactagggaggctgaagctggagaatcacttgagcccgggaggcggaggttgcagtgagctgagattgcatcattgcactccagcctgggcaacaaagtgagactctctcaaaaaaaaaaagaggaagaagaagaagaaagtcagcatctggcagatactggccctttactttattagcaaattcctggaggcccatctttcacgggattactacacaggggtgctgatttagaaaagtgctattttatgtgttatgctctgagggttcattcatgcaggcagtgtgtaatgagcactcgctacatgccaggccctgaggacagagcagtaaaggagccgatgtccttgcctgcatggaggtcccatccaagtgaggagacagttaaaatgcaaacacagctgcacgatattgtcaggtgatgctttgtgctgagaaggatgaagcggtaggggggatggagagagtggggtgggtggggtgctatttcagattgaagggtcagcgaggtcctgcagaagagcttcaatttaaatggaagccaccactgagaacgaataggggggatttggggcatcccaggtgaggagtgggattcagaaagaagaattccttgacatcccaggctccttggtgagccagtggggacacattctgcttgtcatcaaagtgaattacaaactcatccagctcagagcctctgccagagccatctgggctgcagtggcctctttcaaagaaaagagttcgccaacaagaaagcggcacggcatcctgatgaggactggggctttagagttctgggcagaaacgtgttgaaatcccagctcaggcatgattgaggttcatgtcttaatccctgagagctttggtttctttatatgtagtcgggaatgataacagtgcttctcccagagggttgttgtaagtcttcaaagaaacagcctgtgtaaagtgctgagcacagataaacagtggcctttactgccattgtcattctcttagctcccagtggggttctttgcttctctttcattcattccacaataactgagcacctactcattgtcaggctctagatgctagggtacccagaggaggaacacctaagctatccaaatgtgagccagagagtgcacccatccaagaggcagggccctgggcatgcattcctgccattccagctgtgtgaacttggccatgtggtttcatcgccctgggcctcagctttccccactgcaaatagagggctcagcttgccaatcactgggtgattctcctgctgagctcctgggctgaggctggggcacaactgtggagggagcatctgtagccccaggtgacctgagcctcagagaaagctagcctgcctggcccggaggctctgctgggagtggggtgggaagaagcccatgtgctcggaaatgggccagggtcagtgctggggcctgtcgcccccaaggaccctcccacatcaaccagagctcctcatggggaggcagagggtacagccgctgaacgtgccttcccaggagaagcttgaagtgtactcaggatcttggcaggcatcggggttctgaggggtcgtaagaggggccgctagggacagggctccagagaggcctgatgaaggtggagacagaggaagaggatatctaggagaaggggtttgtcctatttcctcccaagtgccacttgcacttctagtgctgggagtcattcattatacagatgattatacagtcattcattatacagatggctggggccaccacacttcttctttccttgcccttctcctcctttcctacccctcaccctgggagtgccttggaccctgggatgacccattctaatttcttctccttccacttacctgtgctggccgggtacggtggctcacacctgtaatcccagcactttgggaggctgaggtgggcagatcacctgagatcaggagttcaagaccagcctggccaacatggcaaaaccccgtcactactaaaaatacaaaaattagcctggtgtggtggcaggtacctgtaatctcagctatttgtgaggctgaggcaggagaactgcttaaacctgggaggtggaggttgcactgagccaagattgtgccactgcactccagcctgggtgacagagtgagactccgtctccaaaaaaatccaaaaccgaaacaacaacaaccaaaaaaaaaaaaaaaaaaaaaaaaacttacctatgctgtgtacctgcctctctgtgctatgggaaactaagccctaaataatctaaataattcattttattcaaaaagcttttttttttttccttagagacagggtcttagtcacccaggctggagtgaagtggcatgatcataggtcattgcagcctccaactcctaagctcaaccaatcctcctgcctcggcctcccaagtagctgaaactacaggcaagtgttgccatgcccagctaatttttaaaaattttttgtaggaactgttgaccaggctggtctcaaacttttggcctcaaccactcctcccaccttggttttccaaagtgctgggattataggcatgagccaccacacctggcctcaaaaagcatttaatgagttctgtttaagggactctttgggtgtgatatagtaaacaaaacaaagaatccatatccttgtggagcttgcatttcagaaagtgagtggacaatagcagcttaacgcagcacttctccaacctagaggtgcatatgggatcacttgggcatcttgttaaaatgcacattctcattcaggagatcagggatgggcctgagattccaacaaatgatgcctaatgttgctaggccatagtttgagtggcaaggggttttatgtgttatccctcctgagatagcaatgacatgttcgaaggaatggctctctaatatggaaccctagggaggtgttggtggaggtggctgggtattgaggacactggggactctggactggtctcctgggtggctgcctgcctttctgtgcagaaggctggctcagctttccagccctggcttcttagctccccactgttcctcctcagccaggctgtgggtgggaacatctggaagggatcccccggaactgggggaatttccaggcacatgaggctctgtcaacccagccaggaacatccgcccctgccatctgctccagacgtcattgcagagtctgtgtgagaggaacccgacagtttccagctcctccaaggagcgtctgtctgtgtctctgggtcctgccctgggcatgtgaggggcctgcctctgctactgctgggggagtctgttgggggcctaagttcccaagtgcaagtcctgcgttttatctgctgggagatgaggtgtctccaaattccaaagatgccctgggggtcttccctaggacgatgaaggagggagaagctgccctggttgttgagaagcctcagcccagaattttctcaccctcatgaggcaaatttgtccaacacacgctgtgctctgccctgtgcaacatctcagtaataaatgcccagttttgtgcactgatggcctgtgcaccggaggctttacagcttgacctcacttgatctgcatggaaactgtgaaactgctcttactctcacctccataccgataaggatgaagcagctcagaaaagtcaggttacctataggaagtagcagagccaggatttgaacccaaagtcactggataccaaagcccagtgttaactcttcagttacattggctccttacatatcctctaagagcaggtgctagctaagagcaggactggatgggactcatccagctgaaagtcttgcttcttcaaactccaagacttctcctggagcttctcctccagccctgtgggaagctcccggtccacggtttggggtggttgtgcccagccctgttcatcacatgcagctgcataagtctgggcagcctctccctgttaatgagagcgacgaatgactctcatcaagtctgggagttactcagcaccagagacaggtctctggatgtgacttccttcttaagagcaaatgcaaacagtggaatgcctaatctcaaagcaagaggcctgggtgctcgcttgggaactcccaggggactcctgagagcagctggcccagtcatgggacggtggggtgggacagccagggcttggggtctgctctctaagggagccgaggctgcagcagctgtcctctccatcccctagctccaccgggataattgacggggagagtatcacctgatgttaaagcccagtgtttattcctctgttacgtttcgttctctctgccaccatctctcaatccagcctcttagcatgggtgcccctagcccaggagccctatgctgagctggcaggtgggttaacgagtcttaatgtatagaacttgtgccaaccacagtgtcgtagaccccgcaggcctctaaaggcctgtctgcctccctacccctatcatgggtcaggccggaactgcaggactcagcaggcaccatggtggcttggtctgtgcccgtcctaccctctttgtctgctgtgccctcagctttaaacctgagccgggcagttgtgacaagggaagagggctccttaaccacgatttgccaagagatgaagggcccctgaggaaaggcttttatttctgtatttcagtttcacagcttggggagatgggagatagctcatgttcccctgaggctgcaaaagttctatgacagccagtcagtgaggctgttcccggtaatgggaggagagacattgtcattgaaggggctgtgccatctcgcctctgggggaggatgaggcagcagccccgctaggacacggggcaggggacggaatctcagcatgtccgaaagcaggtccaggcagtagactcgctgtgtgcccggaccagtgaggcacttctctgggcctcagatcccagtgggaggaaggagggaataatgtcagaagtacagagagttggtgagagaagagaggctggggagatatctgcaggatggaagggagaaggacagggaactgggaagcaggtagcaggcaaggactgaacaggccatggtgtgctgtcccagaggctgaaggacctctctccattggccccatactgcctgctgctcctgcctcctggcacagatgcccctgctctgagagactgtgcagagagagcaggtgggtaaacaagtccttatgtgtagaatttgtgccagccacagtgccatagaccccacaggcctccagaggcctgcctgcctccctgccccaccctacagtgggggccaatctgcttacatctgtaggatccgcctacctcaatcctgtttccagatggagggtatttctgggggttggtagattctgtatccagtcacctgttatcttcttagttctttgaaacccaaccttcaccttggtcccagttccagtcttgggtttggatcccagctctacagccgtctacgtctacacctaccttctgccgtgagccccaagtccctctttttttgaaatgatcatagtagtagtgcctctctcttagggatctttgaggattaaatgagataactggagctcccagcaaaatacccagacataggggttccatgatggctagatcacttctccctcacccctctcaattagcctctttgggttgcgcttgtttccagaggcctgggccagacagttaatagttagggtgtgtggagtgactgcccactgctgccttcagcagtaaaggcgaggggaggaacaagagctgtcatttattggacactttcagagggccagaccattggcatgcaagcatcatcatcctcacaccaaccctgtaaggaggattttatgagcccctttttagagatgagcagacagaagcccaggcttcttgaataccctgcctggatcccatagccagtgagtggtggagactgaattcagatccagcccccattcccaagccggctgggcccttgccactgtcccactcagtaagacacagtgacactcaggggctgggtggccaaaggccaccggtaccaggtgaagagcacctattctggaggcaaagtcctcaaattatcaaagctagggcagcaaagcatgctcagatgaacacagaaacccagagggggacaaggcaaattattccagggacccaagacctgcagggacggaagactggtgggtggagacccaggtacagcagcacccacaggacacggtgctccctgtagtgcagggaaacgctggagaagccgggccagcgtgcccgggaatgcggagggagagggcctgtgctcctccttctgagaaacacatggtttccccaatctaacagcggccaaaaggaaaaactatgtactctacaaaatccacagtatacacacgacccgccaacatttcagcatcatctctccgagagatctctcccagaatcccgcgaaagagccaggcaacacgcacacttgcccaaggtcaaagacactattccaggtatgaattttatgggtaaccagatgacacttgaagcggctcagaagttggcgtgagaaaagtccccagttgttattacttagtgcggcctgggaggaagaaaggattctttgtagagcaatgaaaaggacccagatagaggcaagcccctgccctcctgagcagaaatcgtcttttccatcaacagtttgtgctctgcaccgcccagcctcattgttctgtggcattccgccgggggcaagaacacattgggatgcctcgccttctcagcacaccgctgcctggatttctgtgcaaggacttgaatgtagatttatcctagtcgtcattatttagaaatattttgacaaagtagtttatttaaaggtactatgagtcccctccctgttttttgctgtttatcttttcttttaaattttctcccagaaacagtgtaatcctctaacacagtttgcattgtaaggccaggacaacaacactgaaatgcagcggtgggggccaggtagacacatagggcacatatccccaagagaggcataaatccaggtggccgccagcaccgagggctccaaggcctgccatggccacagcccctggggtatgctcctctccatcctccacctccatctgggccagcacctgggctctggtggtgaggtgctaggacctctttccactccagagggccagggaccaggatactcaataaggatgtgttgaggagctgggggtatctggtgcagaagaccaatgagtccagtcgaggagcgctgattcaggaaacaaaacacccaaaatgtcaaagccaggacagcaaggcgtaaaagagaccgtctcgaccttgaagggtttacatttccagctaagtaggtgagacaagcattctgacatgttactgaggctgcggcctccatgcagaaggcagtgacagtgacaggaaggttgtcaggttgactaacatgggagagggggtaaaacacacagctgctgccctcaggtgagtggcagctggcggggggtggcatgatcccagcatggctgccttccattctctccttttcagtgtcacttgtcactcctcccgttgaggggtggaatctgtgcctcccctctgcttgaatcagggcttctccctagtgatttgcgcaacctataaaatgtggcggaagtgatgttcaggatttctaaggcaacgtcctaagaaccttgcagcttctgcctggaactctagagactcttggcacccagagacctccatgcagtgaggaagcccaaggtggccacgaggagagactgtagggggaagagggtggagacctgtctggccccccattcctgttcccagccatttgagccatccgagcttcagccataaacatccaggggcagagaggagccattccctctgtgccctgtccaggttcctgatccacagaatcgtgagacatgataaaagcaaagtattgttttaaggcactgagattggggttatgtgtgccatacgtacatccacagataaccagaactgggtgaggggacatatgccagggccagggactctgttgacccaaccctttctccttgagaccacacctgccctctctggccccagactcctccaccatggcctccctaagtgctgacactcccatccctgggaccaatcccaatgcctgggcacttccatccctgggaccaatcccaatgcctgggcacttcccctttgaaccccaatttgagagcagatttgctgctgaggttgggggggaactaggggaaccccgggacgggacaaagattctgggtaaccacctctggggcaggtgtggggagactggccggggcaaggaagtggctgcacaggggaaggagtgagccgtgtgcgcatggatgggggaaggagtgagccgtgtgcgcatggatgggggaaggagtgagccgtgtgcgcatggatgggggagggagtgagccgtgtgcgcatggatgggggagggagtgagccgtgtgcgcatggatgggggaaggagtgagccgtgtgtgctcgtggctgtgtgccttcctccatggaagagctccctcgtgcctgtcttccagaactcaggtccagcgtttccagccacctgctggactctcctcagaacctcccacaggccccccaaatccagcacatctcaaaccagaacctgctctaaacccacccccaaggcaattccctgtcattccctatttctgccaagggtgctgaagtcaccagggcccgtccaggtgtgggcagccaaccctctagtggagctggagcagcaataccttgcccacatggcaggtggagatagggggacctgtgggtagggactgaggtgggaagagttgtggcgaaggaggtgggcagagcctggccaagctcataggcagccctaggattcctcccggagaggtaaggggctttgggctgtgtcctgggggctggagatacccacaggaggctaacaatagctcatccagcctcagcatcctctctgcctctttgccacccccttttgctcctggagcagccatagggaaaccctgcagcttccagctctgcagggccctcattcccctccttccccttccactccacccatcgcccgcccccacctcccctaagcccagcctcctaccacccccacacccatttgaccctttctcttccccccttcccctcaaggctgccgacccgctgcccactgtgggagccagctgccgcctgtggctggggacactgggaagggggctggtgccactggggaactacacttttaatttgatttgcattaacctagattttaaaactgataatcaattcggttattgaaaaacttttaggctgggtgtggtagcctaaaaggtgggaggattgcttgaggccaggagtttgagaccagcctggacaacatagcatgatctcattcctacaaaaaataaaaaaatgagccaggcatggtggtgcacgcatgtagtcccagctacttgggaggctgaggtgggaggatcgcttgagaccaggagtttgagtctgcagtgagccatgattttgccactgcactctagcctgggtgatagagcaagaacctgtctcaaacaacaacaacaaaaacccttttaaatatgtttggaacaacttgggtatgtgaacctaccttttcgactgtaaatttaacaaaatctaactgcagatctagcttatccagtgaaatccttgtgtgtgaattagcgcccccatagttgccatatgtataaaagaaagcaaaaaaaagaataacattctcattaataatttttattgattacatgttgaaacgatcatatttaggatctattgagctaatacaataagcaaaaatatatcttaaaattgatttcatctgttttctgtttacttttcaatgtggctactggaaaatttaaaattatatacacggctggagttctgtttctatcggacagcacttctttagagcgtggatctgcactcgatcaacaattcagccctgtgctgtccctggctaaccctttcccacctccgccacttcctcaggctcaatcgcagctgccttgggctcatgtatggctgatacctgggtgctgaccttggtataacacacacatgtttgcaaatacatgtgtgtatttgtgtgtcatgtgcacgcctgtctctatccacatgctcatgtgtacacatctgcatccagacattatcctgttctctgcgtgtgagcacactcgggccagcccttgctggaccaggtgtgcacaggcagcatctgaatgggagccgggtgcccatggggagttgacatggggacagggcctcgggcataaagccttggggccagtcattcatccccaggggaggctggaacagacagtgtttccttggcaagttgatgagaatgtcatgtaggacagaacccacagccgccctgaaatcaagatcgatgacagctgccttcccatcccttactgatgaggtccatcattctatcacgggagagaaaattaaattggtctggcagagtttcctgttcctaaagccaatttggtcgccactgtgtagtgtgttatacacttctgggtggcatctaatcattttgtttattcataaatttccaaggtatggtctgcagagctaaccacaccacaggaaatcaggaggaggtacttgctcctcttctaaagataggaggcagcctatccatccaccatctgcccagccacccagccatgtatccattcatccattgggtcatacagtttttcaacctgtatatacagagcgcctcctccatgctgggcagcgtgtcaaatagaaagaaccatgggatgagattagattccagcacccacccctgggcaggtctctggcttctccaggcctcagtttctctctgttaatgagggagttggaccacagagctcaaggcccctcctagctctggcacttcagggcctggggctgattttccaggcagagagagaggccccctcccagactccaggggctgcttggggtcaagaagggaaccgaagaggaccccaggaccatgggcatcactaactcccacggctgaggtcccgactgacaggaatggggtggccctggaatttagaggaaaagctccctcgtgcctccttcccagaaccccaatttgagagcagatttgagttggctcaagtgggtgtttgtgggattggttatgtctcagagatttgggggatcaggccaatcagcagactctgaaattcgtattttggaggctgtgtcttagagtcccccaccctccagggccggagggtctctggaagctctttctggttcctctccatctccatggccagcatccgtgtttgggcagttcccaggctccctgccttcttataccaataagcattcaccacttgtggacttgtcccgcactgcctccccagcctgcctgccaccctggacctggcctcatttctgggtctgcttctccgtgtgcccatactggctggggagcccactcctgggctctggccatctcattcagctggcaatcccaggtccccaggaccaatgaattccaggccctctcagaaaccttttgccacaaacctggtgattggtggggagtaacggagctgtgttgatctagttaccaagagctctaaattactaccatcaaaatcagacacagcaaaaccttgctcagatccctgtctggtaacatcagtcttcataatgaaggtgcctgattgcaggctgtcttggctgtcggtgggtggaagcagagggacagggatggggagaggggagaggctttgtttctgagcttcacggctttgatctgccagcgaagagcaatttcctccgacttctcgtccaacattcaaccccctgccagcaaacccacaaacacaacccgggaggatgatggcatggagagcatctctgaattcagggaaaggatgggaggaaaagaaggtgttgagagtgtctacactcacctccccaaaaatccctctctccacctgacctcctcgcctctgtaatgtagaccatgaatggactctgtttcagtcctgatatctgctgcatcctctgagcctagctcagggccaggcatagagtagttccatacatattgttgaacagatggatttctagctctaggatcactctaagaagattcctgggccaggtgcagtggctcacacctgtaatcccagcactttgggaggccaaggcgggcagatcacgaggtcaggagatcgagaccatcctggctaaaacggtaaaacctgtctctactaaaaatacaaaaaattagccaggcgtggtggcaggtgcctgtagtcccagctacttgggaggctgaggcaggtgaatggcgtgaacccaggaggtggagcttgcagtgagccgagattgtgccactgtactccagcctgggcaacagagcaagactcagtctcaaaaaaaaaaaaaaaaagaaaagaaagagaagattcctggtagtgatccaatgcaggaatggctgatggtatcatttcttcatttaataaacatttcttaggcagctcttaggttcctggcaccgtgccaggccaaggactgagatgactagaaaatcaaattgttcaataggaggcatcgagctcctgctccacaccaggcactgagatgaacaggacagatattcctacctccatagagctcacacgttcctctccatgggagacagacaataagcaggtaaatagataaataagcaagatggttctggattgtgaaggtgctatgaaggaaatacacagggtgctgtgatgaagagcagttgggcagcttcctttggacaggggcaatgcagggagggctctctaggacctgaagagtaaagagaaagagccaggaaccaggagagagcacagcaagtgcaaaggccccagggccgggaacagctccgtaggtttgaggaatggaaaggaggccagtgaagcaggtgtataagatcgagcgtgaagcggtgctagcggaggttggttaagtcactgtcctccagtggtgatggcagaccagggaactatcagagcagaaaggccagtgctgccgtggaagtggaatgtgcagggaagcccggaactcagcccagaggaggcaacattggcgctgagacctaagactgcgtggaatatctcttaggcccagcatggctttccttcttgccatcactttggacattgctccagggactgacttcctctccctcccagccaggagcagggctctggggcagtgccagctggaccctgctccagcccagagggactcctccatacgacttccctgcgctgaagtttctgtcaacctctgctgctgctgcagacagctactggttggcggtggctggagtactcagggtaagcgcttgtggcagatgttgctgcggtggggtaatggcactaacacggcgagtccctttctttcatctccctggtctccctggacctttaactatcactgagcccagcatctagcaaatagcctcattgctgtcttttatctagctggctttcaacttgagacactctaagggccttgcctgatagcagcaccaggaccatcagaactacagtcctcagagtgggctgttccaggcgtttgagtaataataataattattattattgctataataatatatacaattataatatctatatataatatttacataaattattgatatgataattattgatgtaataattattgatatttttgatgtaataattattgatgtaattactgatattaatgttggtgtaataataattattattgatataataactgcaacatcagctccctatttattagggtctgggcatgccagacactgtgctaaaaagtttctatgcatcattttatgtaattctcactaccacattataaggcaggtattggtatgaggctcggagaggttaagtaacttggccaaggtttcacagcaaacaagtgctggaattgacgttagagctagggctgttcaggtccacagactccttcctccgtattctagtggttcccggtgtcgggctgactgcagtggaatcagcaggggaactgtttggaaagtaagatttccatcctggctaacacggtgaaaccccgtctctactaaaaatacaaaaaaatagctgggtgtggtggcacccgcctgtaatcccagctactagggaggctgaggcaggagaatcgcttgaacccaggaggaggaggttacggtgagccaagaccacgccactgcactccagcctgggtgacagagcaagactctgtctcaaaaaacaaacaaacaaaaacaacaaaaattggttgggggtggtggcttgtgcctatagtcccagctacttgggaggctgaggtggagggattgcttgagcctaggaggtcaaggctgcagcctgggcagtggagtaagaccctatttcaaaaaaatacaaagcgttctggaggtggttgcacaacaatgcgaatgtacttgatgctactgaactatacgcttgaaaatggttaagatggtgaattgtgtgttatcctaataaatttttaaaaattgtttaaaaaggaagaggaaaactaagtgttaaattgtgtggggatggtagacattggtagttccccagtattcattctcccccctttttatttacttatttttagagattgctatgttacccaggctgatctcaaactcctggcctcaagcaatcctcctgcctcagccccgaagtagctgggattgcaggcatgagccactgtacccagctttccccttttagctgagtacatggctgcccagattagacactacatttcccaacatcctttgcaggtaggtatggccatatggctaagttctgaccaatggctataagtggtaaggtcctgtgaaagcctccagaaccttccttaagcgacagtgtctgtctattcctccattggctgccaggagcatgggtgctgccattttggatcatgaagttggagtcacacttggcagagcaataacatgtgagatcctaaagttgacacaccctattatctcttaattacctgctgggacgcatgaaagagaaacaaactgtgatctccttcaagccacactattttgattttctattatgtgtacctaaacataatcctaatgaatacagaggggtagaatgaatgctactggggtttcgagaaacagaaaggaccaggagggttggaacattcaaagaaggctgtatggctaaggttggccctgagctgtcctgatggatgctgtgctgcaagatgaatgaggcatggcccatgtctttgaggggctcagggtctagtgggagaaacacaggtagacaaatatctatagccagggccattgcaattagctgacatatgggcagcccttggcatccaccaggctgattacatggctcatatttatttttatgttacgttacgttacgttacgttacgttacgttacgttatgttatgtcatgttattttttgagatggagtctcactctgtcacccaggctggagtacagtggcgcgatctctgctcactgcaagctccgcctccaaggttcaagcagttctcctgcctcagcctcgcgagtagctgggactacaggagcccgctaccacacccagctaattttctttatatttttagtagagacgggacttcaccatgttagccagatggtctcgatctcctgacctcgtgatctgcccacctcagcctcccaaagtgctgggattacaggtgtgagccactgtgcccagcctttatttttatttttttgtgacggagtttcactcttgttgcccaggctggagtgcaatggcgcaatcttggctcactacaacctccgtctcctggattcaagcaattctcctgcctcagcctcccaagtagctgggatttcaggcatgtgccaccacacccagctaattttgtatttttagtagagatggggtttccccatgttggtcaggctggtctcgaactccagacctcaggtgatccgtctgcctgggcctcccaaagtgctgggattacaagtgtgagccaccgcaccagctcatgcctcagccacatcactggcagagtgtcaagggacgcaacaggaaattcatgctaagttgtcgagttctggaaagctctgtgcaggaagtgatgtttttctgagccttgaagaaggcatgatggggaggggcattccagggcagaggcacacaagaggcaacggcgtgagggtagtctggtgaggctgggccggtggtggctcacgcctataatctcagcactttgggaggccaaggcgggtggatcacctgaggccgggagttcgagaccagcctggacaacatggcaaaaccccatctctactaaaaatacaaaaattagccaggcatggtagcatgcacttgtagtcccacctactcaggaggctgaggcaggagaatcacttgaacccaggaggcggacgttgcagtgagccgagattacaccactgcacttcagcctcggtgacagagcgagactctgtctcaaaaagaaaaagtgtggtgcgagagacctggcaaagcagaacagtccatccctgcacaagcggtttgggccttgtttacaggaagccatcacacggacctgagagtgttcttgattaaaaggagactatacctgggatgatggatctttcagatacatgattatttaatttttttttttaaaggccaaattcttcctgggaagaaagaatcagcaaggtgcagaggaggcaggtgaggtcctgcctagatcgttagaagtcaatggctccgtcggcatggcaggggagaggtctgcaaaaaggcctttaaaaaagaaaaattgcaaatggtttgcaaatgtttatggataggtccagaaccatgaattttgacaactaaaggatttccagagaggctgagggaaaagccagaattgagttaagcagagatttataacagtttttattggatggaaggtccccatctgtactcagagatctgggttacattaaatatcacttccaatgagatcttgtcttaaatttaatgggcaaaagagaggagttagataagtgtttgtatcattattttaacaagtctctgctttatgagaaaaaaaaatctgtttaagaatagcagtgggtaaattgtcacagttcagttacctgttcctgaagaatcgactctcccctggctcaggctctgtggtggtagctacttgatttacagacaggtggccagagagaaactagccagcccctctagggcactgtcccaccttgccaattccacccctgtttccagaacagaacatgggtaggatgaggaccagtgcgaaggagagggaggaggcacgtgtgagtgagggggcatctgactggggagaagggctgttctgcaaagtggtgggtatcaacggcctttcatcctcctcccttgcccctgggggagacttagattctgcaaaatgcttttttcttttttttttaaattaaactgttatcacaacttcctatggagtaggcaaaggcatccacaaagtgttattatcccggtttgaaagaaaggtaagcatcagacaggtgatgtggcttccccaggtctaatagctgccaggcagtgaaggaaaggccccagcaccaggcaggggaaggtgggtaacccaagggaagcctggagtccatgcagacgtcccagcagaggcatggccgagggaagaagcctctgctcccactcaggggggctcatgggagcgaagaagtggcagagactgaagtctgaagacctccgctctgcctttctggcccctgtgtctttttcatgcctgctcacccacccacagtgccctcctccccccggggggaggggccgccccttcctcccaggggctgtgcccaatactaaacaatttctgcccaggttcctgtctccacaggcatccattgtcattattctttttttaaaaaaatcggaatggattttattaagagaaaatcaatacacacaacataacctgcagcagataaagcagataagctttcaatgcacagtctcggtgccttttcccaggtgttccttccactcccttagccagaagcctttgtccgtgggcatctgatgagccacttctgggaagccagcctccctgctcctcttaccagcagctttgttcagcagccccttcccacctcccgtctcggctctgtgctccatcctggcggctagccccagacccagccagaccagccgcctgtagactcactcgtctttggcctcaggtcaagggcctccccagcaggccagcccattgccgcctccctccatcactacatcagtgtcactcctccaagaagcaggcactttggggtcaatagcctctggtctccattcattcctgtgtggccttggacccattgcataacctctctgagcctcaggttcctcataggtaataatctagacaataacactcttttccctgcattttgggaccaaggaaattacctggtatacgcagcaggcctaatctgtgctcggcacatagtaagcacatggtggtgtttaacttccttctcggggtccacctgtgtccctgctccttcattccatctttctgagcactgaattgccagaaggcttatcctcagaacagagcagcctacccctgtctgctctccttggtgtaccaagtgcagtgggcatcaagctccccatgaaagtccttgtgccgagtccccttaggagggacagagctggaatttggatgtaatgagcactcagagcatgccaatgagagacagggaccagaaagttagagaaggtgagggggagaaggaatgaataaagggagaagaaagaaagaaatcatgggggcaggaaggaaaggaaaaaatcttttttttttttttcttttaagagacaaggtctcactatgttgcccaggctggtctccaactcctgggctcaagtgatcctcccaccttggcctcccaaagtgttaggattacaggcgtgagccaccacgcctggccggaaggaatctttcattagcaacagacatcttgttaattatacagtgactggtacagaggagggactcaaggccctttgtagtaacagatgatggatggatggatggatggatggatggatggatggatggatggatgggtatatggctaaatggagggaaagaagacagggaggaaaggaaggaagagggaagagggagggagggagaaaaggtggaggtagtctgtgttctcctggtctgggctcctcttcctgtccagctctgctctgccttgaggggagatggggcttccaggtaagagccgctctgaggagtcctgcagcaaggacacctatttgattttgactcactgcttcccaaacctctaccatcatgtaactttttctttttttaattaagagcacttactttgcatcctgaagatactaaagttttgtacagtgcagtttaaaaatgttgctgtggactagagaatagaatattcacactggaagattgaaggggtcattgaggtctctcttgaaaactcctactcaccctttgaagcccacttcaaatgcccttggcactgagtggtgtttccctacttttcccccagggagaattaactagtatctttatctgtgcctccatgacccttatacaccactttattctgtttccttcacatggagttggctggttgtgcccatccctgccagacagaaaactctttgagggcaggaattatgtgctgctcaactgtttccctagcatctggcatgtaataggtcctcaaaacacatttatcagctgaattagtccaagatctttattttataaagaagtaaactaagacctaggcagccaccaggcctggccccagggttcaccagcgaagcttggcagtggtgtgtgccagcctaggttccagctccctgaccctgagctggctgccacaattgctgggttttctctcagcatttctgttaacagtcgagtaaagaaaggactcaggtagggataaactgtagctaatacctcaccttggttaagcagatgtcagggtggccatttctgttcctacattaacaccacatttatgttactggcagctgcaggtttgctttaagggctaataggccctaactagggtcctgccctgagcctagttgcatagaggattgtgctttctcttattcttctgtgtctctgactgctagtgccctagtgaggacagtagccctcagttcaataagcggactgctagtgccctagtgagggcagtagccctcagttaaataagctgactgctagttccctagtgaggacagtagccctcagttaaataaggtaggtggagggatagcatcttgaagatgagaggaggccacagagaacctagtcagcaaggaggccagggctgacccctaaaggacccacttctcccaagtcttcctcatgggccttggggagggggagcctggagctctgaaccaacctggtggggacagggtggggaaagcagatgtagggagctggaagagggtcctggggccccgagggccaacaccacccctagacctgcttctgcccacctgcagagccttcgccccagcctgggttggttcctagcatctatgtctgtgcccccagtgagtgtggccttgtctctacatggagttcacatgcagggtgtggcttctgggggacaagggcggaatcttatgttcgatcggttaaacaattctggagggggcatgttttgtgtgatgcctggagggtgggtggtgacgggcacaaaggttgtgccacaggtagtttccttttagggcgtttagggtcttgtgaccctagatgtgcctctctaccttccccagggcttagcagctaggagggaccctgcaggggcagagtgatcggtgccagcctggggcggggctgtggggtgggcagcccccttcacaggctgtccatgcactggggtgagatggggcccagggaggggtgtggggggaaggatgatcagattttcccaatgtgaaggtgtggggcaacagggatccctatgtttctagaggaggggatggcagatgtcaccagtgccctaccctcgtgccctccactgggatgactctgagctgggggtcccacatgcctccctgagctcctcaatgggattaaggtccagtcatcaggctttcctccctcccctgcccgccttccccacctccctactgggacctcctgggattacctcccaaataaacaacctgcccttgaatctttttcacaggtcctgcttctggggaaactcaagacagtataaattggtgcaatctatttggagaaagattcagcaataagtatcaaaattataaatgtacgtgttcacgggccagcagctccacttctgggaatttatgccataaatataacctttcatatgccatatgatctatgaatgaggttatttatggcagcactacttttaagagccaaagattgaaaacacctaaatgcccatcgctggggatgagttcggcagatcagggttcattcaactggcagaatattatgcaatcattaaaaaggaatggagggggctactctttatggactgatttggaacaatctccaagataaattgctaagtgggaaaaaaagcaaggtatagaagagcacgtttgtataaaacaaaaagaatatatagccgtaattgcttacttattggatcgacgatctctgcaaatctaccaagaaactgataaccttggagcctgtggagagaggaattaggtggctgggagtggggaagggagggagattttcaggatatttcctatgcaccttttgatttttgcatcatgtgcaagtttgcattatctatttaaaatgtagtctatgcaactaaaaaaaattatgaagaataatcatatacctgggtgcctgctataatgatcagtccaattttagcttgtctcgggaaagttgaacccatggctggcagctttcaaccttctctttctcatttaccactcccataaggtggttctgcatcattactccagggtttctaaataattaaagtaggcctgagtccagccttcccccaagatgctgagagtccaagccgtccttcccctatcccctacctgagacatcagaagcttcttaaatagtcctgactatttaagggaagaaggacagttgcagcccttcctttctcgagtgatttgaaatgcagaccacggtttttggagaggaggagatgaggcaggaggctggaagaaatgaccttttcacatcagctcttcctgggtgggtacctatattccaggggcctggcgcagtacctggcgcgtttgttggctggctggctgaatgtctttttgtcccagaattccaggcatgcaggaacaaggggaaagatgacccctccttccagttcctggggtcctagtcaataatggttggtgagcagagctctgaagttggacactttcgggtaaaaatcccagctgtagcctccttactgctatgagaccttaggtgaatatctacccgagcctcagtttcctcatctacgcaatggagacagaggccccctttgcaaaggattaaataaggttgcatcggggtgctgcacagtgtgcccagcacatagtaggctttgctaggtgtctgcatatctctccccctcccttggcagaaggatgaccactgccactgctgagaccagacactgtcccctccttgccacccttgacttgagggtggaaggaggaccaccctcaagtcaaggaggtcctccttccatctaactgaaaactctccgctgttacccaggccggtgccctcctatgctactgtcatgcacaagagaaaaagctctcagcttgttcccactgagcctcttccagatctgaagccccaaggaaagtcaaggttgagtcctgtgggcccaacaatgggcagccccaggccctctctctttgcttccaatccagtctcatcacttttctcctctctgccccctcctgggcagagcgactcttggtgcaaggtcagctgtgagctgtccagggtccctgggcacactcctgctccttctctgccccatttccttcccctgcacccagggagttgggaaatagctcagattccgatgacaaggagactgggccctaggcagagcagtggctgacaagttgcatgttacaataaatccccacaattagaccctgcaaacaacaccgctgctgtcgcatccctaatatacagcagggagtcggctcagtgttcctggcaaccaattcttgaactaaaaatagttggctgtggcttcacctttccctcctcagcatccagtctccataggtgccagggagggaatgaccctggtgtccaggtcctgccctggtgctggagggcagagcatcaagggttaacccagccttcactaatgtgactgtcaaggaattgcccgcagggtagggagtgggggtcttctgtgggggacgggagccggcctgagctgttttaaagcaagtaaggctttttgagtaggcagccacctcctgaggcctcccaataccacctcttcagcaccctctcgcatccccacccgtccagcagcagcacaaaggggcccgaaggtgcagcattagggaatctaatggcctgaggaataagttctcgcccactgtgactccttgggccagtcacatctctggatttcggctgcctcatctgcaaacgaaggattcaataagttgatctgtttctgtctagatcctcaggcatggtgagcctcacaatggcaagtactctgtcccaagtatgctcacatgcgtcaaagtctctgaaatgctgacacgtgggtgtgcaacccccctcgcagagcagtggtcagcacgtacagagaagcagcccagccctatgtcagaccctctgccttagaaccacttgccaataataaatcacccaccacccctatgaaacaggtggttcatgaagtcttgtcaatcagtcataccttagtctagaagtcctttcctgggagacagggggaagcatggagtctggggttcctcctggggctgttgggatatcaaaagccttacctggcttcccaccatccctgtggaaatcccccaagtggaagccatgggccgccacaagacgtggccccagcccagctttccaatctcagaacgtcatcccctgtcctggggtcctaggactcctcgctgttccccaaacagacggagcacagtcccacctcccggcctttgctcacaatggtgcctccacctggaatgctgttgccccttctcccctctgtctctctcccctctgtcccctacatttctatgttggtagaaatcctgctcatcttttaaagtacaaatggaccgggtgcagtggctcacacctgtaatctcagcactctgggaggccgaggcaggcggatcgcaaggtcaggagattgagaccatcctggctaacacggtgaaaccccatttctactaaaaatacaaaaaattagccaggtgtggtggcgggtgcctgtagtcccagctactccggaggctgaggcaggagaatggcgtgaacccggtaggtggagcttgcagtgagccgagatggcgccactgccctccagcctgggcgacagagcgagactccgtctcaaaaaaaaaaaaaagaaaaaagaaaaaaaagaaagtacaagtgccaccaactctttgatgaagttttccctatcccgtggctagaatgagcccctcagtgtccctcttctaacagcatttgaaacgatgtagttttggaaccagaagaatcttagggaccatgtacaacagcgtttcccaagatattttgactgtgactcatcgtaagaaatccactctgttgtgacccagcacacacacacacacacacagagacacacaagtgcataaaacacatgtgcatatacatatagtccacactcaaccatagacacaaatagacacacgtacacatacatgcaggtacctgtggaaacatgtacaagagatgtgcagccaaaagaagtttttttgtttctttttgtttgtttgtttgtttgtttgtttgtttgtttttgagacagggcctcactctgtcacccaggctggagtgcagtggcacaatctcaactcactgcagcctcaatctcctgagctcaagcgatcctcctgcttgagctctcaagtagctcggactacaggcatgcaccatcatgactggctaatttttatatttttgcagagatgggatttcacaacattacccaggctggtcttgaactcctgagctcaagcgatctgcccacctcgaccttccaaactgctctggggttgcaggtgtgagccaccgtgtcagcccaataagtttctttgtgtaatacttacctctattgtgtgccgtgttctgatgcagttgcttaaagtttttttctttcttcgaatgttggttctgacactaaatttatctccccatcctgtaatgggttgcaaactgcagtttggaaaatactgaacaagttcgaccccttatttgcagatagaagtaccaaggtccagagggaggaagggactggatcaaggtcatgcagccagttggtggccagactcggaccacagtccagtgtccttgattcacagcagcgacctttcctctgtcacagagccgctgatgctatagctattcctgcaaggttgcagctccacaagtgaaaggaccttgtccccagcaccccccaccctgccccaagggccttgtctatagtaggtgcccaataaacggctccattggactgactgcacaatgatgcaaaagtggtttggaagtcaatgaggtctctgctggagtgaggggttaatacattcagctgctgcggcctggagacaaggtcagctttagctcattagtggggctgggctttcccagggcttagggattctgcaattcacagtggagcagaaatcctgcggctgagctgagggggaggggcagagacagggaggaagggaggctggaagagaggtggagatcgatcagcagggaggggacgttttggggaaggaaggtggtcagggtggctgtgatggtgacagcgggtggcaggatatgacgggatatgagggggtctgcagctcattgaaaatctgaacaagctccaaagaggatggaactcagtctccccccagctcctcctgtcttcctctgagaagtggcaggggaggttggcgaggcaatgtgctgatgagcacagagaaatgaggggcggcggagatgcagaaatgagtaatttccacacagctctgcttaatatcagagtctgcgctgctcagagatggccaaggagccacttgaggcctctacagccccctccttcctgcgacactccccccttccacccatcagagctcaggacactcatctgttaatgagacgggcagctggttccccacacccatcctcggatggagctggcaggcacggactcctcaggggctgggggtgctaagccatcccctgtggccgcccctctgcttcccaatgaggggtgtgattggcacagatcacagagaaaggagacaagcagggtagcctggcaggagcagagtcctggccattggtttactcattcatttggtgagtatccattaagctcctgctgtgtgccgggcccagtgtgaggtgtgcaggagtgtagctgtgaacaagactgttgagaatgtagcagagaaaacgggctttagaccttgctttgagcaagggagaggcccacaggaggcactggtgaaggcttcctagagggggtgaggtttaaggcaaaatttccaaagaagttgaggagtctggagtccaggtgaggagttgagatgggacgggtggctgaggaggcctctcatatatgtggtttggtggggcctcctcagccccgtgtctgggcctcagctttgcagcatggggagctctgttgtttcagtcgcctttaatgggaattcgactcacaataaacacaccttccaaagactgagtcgtacatcaaaatgtcaattcatttttttttaatggaaatatatttgacaagctaaaccttatcagcagcctgcttcaggatcagaaatccagagtgtgagcctccatgccacatcacaccaactaggaaactctgggcaaacctttcatcttctatgagcttcagtttcctcatctgaaaatagggttaatcataggacttacctaggggcatgaggaggataaagtgagctattatgtgtcaaagtgcttcatctctatagaaggactatacacaagctggtgagttcataaatttgcatttatttatttatttatttttatttatttaccattttgagacagagtctcactccgtcacccaggctggagtgcagtggcatgatcttggctcactgcagccttgatctctcaggctcaagcaatcctctgacctcagcctcccaagtagctgggaccacagatgtgcacccccatgactggatactttttttttttttaagacagagtcttaccatattgcccaggctggtctgaaactcctgtgttcaagtgatctgcccgcctcagcttcccaaagtgctgggactacaggcatgagccaccacgcccagcctacatttattttcttggtagatgatgaatgtgcatggtacaaattccaaaggtaccaaaggacataagttgaccagtgagtctcctccctggtcctcaccctgcctcaatcattagctacccagttcccctctttggaagcaacccaaattatcagtctttgtgtataactttttttctaaaaagactctttcatattacaataataacgtgtggtataaaaaaaatccaaagggaataaaatgaacaccttttattccttccaggctcccaccccagaggtaactgtggggcagtctctcgtttaaaggataactattattgctagtcctggatgtacctctcaggggcagcctactcaggagaccaggttataaatgagaacatgctggatttgccaggaaatgggaagaaatgatgtcaggttcccaggggatatttttatcaacttagtgagaggtgaagccagctggacttcccaattctagtgaggacttggagaacttttctgtcttataagaggtttgtaaaatgcaccaatcagtgctctgtaaaaatgcaccaatcggtgctctgtagctagctagaggtttgtaaaatgcaccaatccgtgctctgtaaaaatgcaccaatcagtgctatgtagctagctagaggtttgtaaaatggaccaatcagcattctgtaaaatggaccaatcagcaggacatgggtggggacaaataagggaataaaagctggtcacctcccccctgccccccatcccccccacccaaccagccagtagtggcaaccagctcaggtctccttccacgctgtggaagcttccttctttcactcttccgctcttcatgataaatcttgctgctgctcactatttttgggtctgtgccaccgttaagagctgtaacactcaccgcgaaggtccacagcttcattcttgaagtcagcggcaccacaaacccactggaaggaaaaaactctggacacattagggccaaggaatgaatggcccctggtcactctagaaagatttaccatccaccagtccttctggtggggccctctacagggtgctgtggagaacacaaagatgaatgagagaagcatgcgtctttcatcttttattagtaggacaaaggacttaggtccgtggattcatccaagtctgaaagggacaggagaggtcccctaattacctctcagcaccactgctatttcacagaccaggaaaccgagatccagaagacatgatgtgcccaaggccacacagcaaggggatggctgggtcaggtctggcaggcagatttggggatacaaccctaaaaaaggtgggagctgatgcatgagagtggggggcctggagtgtgtgacaatccagaagagaaggaaggaagggtactccaggcagagcttgaggaaaagccccagagcagggggcttgggagtgcacaggattcactctgactcccagcaggaggacccggagcaaggctgggaaggaggggtggacagaggttctgttccagccagggagagtcaccgtaggaatacagcagccagaggctcagggcccccagtgctgttaaactccagagaacatgttccttctgcagcctgcatggacgcacctctggagtctgcaccacaccactccccctctgtatagttggcacagctggagaggcatggccagagcttcaccttcactgcttttcttccttgagcctctctgcctcctgcctctttcaccccataacagcatccttcccgtgaggggagactcccaggtctcctctgtgacacccctatcaataagtcctccacctgcatttcctccacggggatctctgctaatttatttggggtgactcccatcctaccttcacccccttgccttgggactgtcccatcaggccccctggggtggcctccccatccctccagtttgctggaatcacaggcaaggaaagcctcatcatgcactagcatttgcaaactcagctcccaagcagcctgcagtcgccaaggtcttagcgggaagcgatggcccaagcccactagtatctggataatttgagaaggtcttgttacggggactatttacaaatatgtgcacaaggtggggagacctcaaggggacatgcaacatcttgaggccagtgggaactcagctgtgaccattgttaggtccaaaagaaaaaggggagggaggggttaccacacccggtagaagagccatggagagaggctgccacgggagccgcaaggacctcagtcaagggacacagccagcccatggccaacccacagggagagagttggagggataagtacccaacctcaccctccttgctccagcctgggcttcctattggctgagcccagccagagtgggaaggtgacggagaccttagacagccctgagcacagagcagacagggagggtgaagggtggatgtggaggggaatgggagatccccagcatagccacctacttccttcaccatggactgacgcccatcctccctcctgtcctcacgagttctaccaggctgtatgcagctgatgaatcctcgtctcccaggtaacacctcctttccctcccctcctcgccacatgacttaggagccctctgtgctcctcctgcagctggtctgcaggtgggaaccataacctaagccattatcacccccttgccccaaccccaggggaacagaaccatctagccaggctcagaccagtcctctcatgaaggagggactcgggaaggggtgggcatgaggccttcctcttctggaatgagctgctgctgtgtagccagtgggctgatccctggtcagcacttccctggctcaggcatgcctggaaggtgctggcccccatccagctgagccactggggcctggccagatggcaggcagcaatgccaaagctggctctgagccacaggcctggctgtgaaaattgagcaacgggtggcccaagggaggcagatgccctcagccacctagggcagagccccaggtggcccagccccatcctgctgtggctcaccagacttagacttcaggtccactgagtctggcaggggccctggggcagcagccatgccctgggaaggcaatgtggtacagagccagggaggctgagagctgggagcccgggctcggctctgcgctgcccccacacacatggtctttggaaaattgcttcctcttctgagcagaacctttctcccaaattgagatctcctatagaaccccactatataaaactggttgaaacagaagtgcaccccacagccccctccctgggctccccttcaccaccccctccctgcacccaaccttcagcaccagtcctaaggcatctttttggaatcttgggttccacagaaaacggtttggacaccatggtctgcgtgctccctgagtggtcccaggcagctcccacaggctgtaagatttttaaatgcatataaaaataggcaaaatgttataaactccccatgtacccatcacttggattccacaattaacaactcacagccaatcttatttcatcaatatcctcacctgcttcctcctttcccatagtattcagcaaattctggacatcatgtcatttcatctataaatatttcagtctgtatctctaaaagataatgactcattttaaatatataaccacaatgtcatcattacacctttaaaaattaacaaccattcctgaaatcatcaaatatctaagcagggttcatatttccaattgtctgtttataggtttttggttgttttttaaaatctgttaaaagagtcagagtccaaatgtccacataacatattgcggctggttgatatgtctctttggtctctctttgtcttgctctgggagttagaagtggccactgaaggtcagggtggccatttgcatgggcttcctcgggggcagtgaagacactcccaagagcctggaggggagatttgtcctgccctgacccctttgtaaggccagagggaaaaggagaggagggaaggagtgaagggctgggtgaggctgccgctgcgtcttcccaccaggaggctgtagctgcctgaccggggttgggtgtggggctgttcccatccaggactgggtggccttgaaccccagaaaaggggggtgcctcactatagtgagcaggactcagaagaggatggtgctcagagagtgcgctgccctggaggcaggagcctggggcctaagccgctggtaaaaatgaccattaaccaaaaacatttcgtttggcatctgctgagatatgactttgccagaggctgggactgcagtgacgactggaaagcagtctctgccctctgggagcttgacgcacttggaatcagctaagcacataccttgtgtatttaacctctagatttcaatatacctatctgtaaaatggaaaaatagtacctcatctattagagcagctggtttctaccaaagcgctttctagctctaaagtgggattttatgaagagggaaaaaagggacaacctatacctatagtagagatgaggggagggcagggtgaggaacatccacactgaaagcccagagtctcaagtcctggcttgcctgactaccagctgatgctccaccatggctatcaccccagtgccttcccatggccccagtgctccagaaatgatggagttcaggaaatgcagagtggtggaccctagcctcttcagacaggatgggtctggatcacaacctcacggaggagccgcatttctgctgtccatggtgccacactgttgacaaggccaggattcctcaacctcagcacatgggtattttgggccagataattctgtgttgtgagggctgtcttgtgcactgcaggatgtttagctggaccacagcctctacccaccaaatgccagtagcactccttcagctatgacaacccaaaatgtctttggatattgtgaaacgtccccccgggagagagccactggtctgggctggagggacgcaacttctctgtaaagataagtggatgtgtgcaggtcctgtccacgctgatcttctggctgacatctatgatgtgttttcacttccaagacgccttctcattcgcccaactcttcttatttcaaacctcacctttaaaaagtgtttttttgttttctcgtttgtttgttttttgagacagagtcttgctctgtcacccaggctggagtgcagtggcacaatctcagctcactgcagcctccgcctcctgggttcacgccattctcctgcctcaacctcccaagtagctgggactacaggcgcccgccaccacacccagctaattttttgtatttttagtagagacggggtttcaccatgttagccaggatggtctcaatctcttgacctcatgatccgcccgccttggccgcccaaagtgctgggattacaggtataagtcactacacccagccaaaaagtgttcttaaaaaaaaaaaaaaaaagcaacaaacttcaatggccctcttggccacacttaataaatgcaaaatatggtaattgtgcccagggtaagttctcttgcccttgagtggtacagagtcagacttggagggaggaggaggagccctctgtggccctcacctgttgtcactgccaacctctgtcccatggcttgtctccactcccccctttagcccatccactggggaaagcaaaaagggaagactaaccccagagcatcattttcctggagctggagcctcctataggtgataccccagctcaccagagggctaggctcaggtcacctctccatggtacactggaaaatatctggagtgggagttggggacgtgaggttccgatcctgtctgtgcggaagccagctgtgtgaccttgggctcagaggtactgacctctgaactcagccttctcatcggtaaagtgaggctgttaatacctccttcatggagttattaaaagaattaaatgggaaaatgtttgtgaaggaactacatagtgcaaattgcaagacaaatcttaattattattattatctgttgttctaagtgagagaatgaagaacatcacaccccttatccaaaggcctggaaaacccacagcccctcccctgcaaccccccagcctcatcccatctcctgttcccagccgaccagccccctcccctgcagccccccagcgtcatcccatctcctgttcccatcagaccagccccctcccctgccctatacttgttccttgggctctgtctctaagcgaccctcccgccttgaaagtctccctctctcacatgtccatacccacttccttcaatacccagctcccaacccacctcttccagaaaaatctttcctctgacaaagggggtgagctcaaagccagatcacctctttccccaactgaattacctattgtgacctccacaaccccatgccaaactaagcacactgccaggcagatctaggtgaatagtaacaatgacaatgacgatcattcataatattgaataataaaaatagcaaacatttgaagcatttactatgtgctaggcactgcgctaagcactttacgtattttaattcctctatcaaatgccggttggccacatgggattaaacacctgcctctgcctccaaaccccagcacaagcatcacctccttggtagagtcttccccattggtctcaggcagaattaatattcctgcctccacacccgcagtgcctggtctattgttgacctaatttcactagctcttaattatttatcaaagtggctgcttcccattccagcctgtgaacatcttgagggccaggaccctgttatatttatctttattagcctcagtgtccaacagtgactggtacctagttgctcctcattaaatgtttgttgaatgaatgcacagatgaatggagtaattaatacaatatcccccaatgttcatgggattttaaagaggccactttcctagcctcatgcttcacaaacattccagaccagtgctactccaagcatgatctacagaccggcacctgtctgcaaactgtgttgccagtttatgacctggtaagtgcagaaattgagcataagcatttagacttttttttttttttttttttttttggagtgagagttttgctcttgtcacccaggctggtgtgcaatggcgtgatctcagcgcactacaacctacgcctcctgggttcaagcgattctcctgcctcagcctcccaagtagctgggattacaggcatgcgccaccatgcccagctaattttatatttttagtagagatggggtttctccatgttggtcaggctggtctcgaactcccaacctcaggtgatctgcctgcctgggcctcccaaagtgctgggattataggcgtgagccatggcacccgacccatggctcatatttaatctccacaactattgctatcatcctatttttcagggggaactgaggcttattgaagttaagcaactccccaaggtcctagagagcagtggtagggcagaggtggtgacccaagcactttgatccacagctcacgcctcagccacatcactggcagagagtcaagggactcaacagaaacattcatgctaacttctcgggttctggaaagctctatgcaggaggtgatgtttgttctgagccttgaagaaggcataatggggaggggcattccaaggcagaggcacacaggaggcaaccgcgtgaggggagtctggtgaggttgggccgggtgcggtggctggtttcaaactcctgacttcaggtgatccacccttctcagcctcccaaagtgctgggattacaggtgtgagccactgcacctagctacattttgacatttttaagccattagacagaatagttttatgtccatttgatgtgctagtgtttaaaacagggctttcattttgtctttttttctttctttctttctttctttttttctttttttttttgactgagtctcactctgttgcccaggctggagtgctgtggcaggatctgggttcactgcaacctcctcctcccaggttccagcgattctcctgcctcagcctcccaagtagctgggattacaggctcgtgccactatgcccggctaatttttgtacttttagtagggatagggtttcaccatgttggccaggctagtctcaaactcctgacctcaagtgatccacctgccttggcctcccaaagtactgggattacaggcaatgagccaccacatctggccttttattgcatttttctaataattcattcccgcagtgttttgcaatcgcattggcctgtgacagattagaaattttaaaatacagaaccagttctttgccacagttgtctgagaagtatggttccagaccagcaacctcccggggatggttaagccagtggaaccccacaggtaggaagtgcctattcagccctgcctccctgggtctcacccatcattacatcaaatctgtctctcctactgttgggaaggacatgtgattgtcttttattcctgtttggaatcctcacatttctcctgtcttccaaatctggcagattaaatgaatgaaagctgattctgctgctggctggacaggaaggggtgagaaggcaagggagggatgggatgagaagagagtttggaaaaggccatcctgggaaaagaatgctggaatggagtaggagcctatcctgaggagggtgtgcagaggctgctctggctggggctgagggaaggaagggtgtaggagggagggacagggcagacactagcaccttcaccaagcccagcagatgagagccaggcccttgaaggtgaaaggaagtagtttcaggacaaatgaaaggggatattgaacctttttacagaaggaatgttaaacgccaaactttcataacccccctgaggctgccaaggccaaaactataaataagtaggtcgaggaattaggcagaagcctcctcccctgacctgtccgtcagcgggatgtggtggggtggaggttaagtcagtgaaatcaacacagacaggatgaaatgagctatctgtagacgccacttcagaaagcgagaaggtctgactcctgggcaaaaaagtcaggaagagcaagacttgattgcagtccaatcaatggcattagcatatttaaagatcatgtcaaggggaggataatggggctcagagaggcaaaatttgatggtgtttattaagcagagagaaacacagaagctggagccgtctagtccttagagagtgtgctccaaggtgggaccagggagggagcaaggccttggctgggcctgggcaaagctaccagaggaccaaccggcttcctctcctctgattccacagcctactgctgctggtgaatttctgatcaagaattctgctccccacaaagaactgcctagagggtgggaccaagccacccctcacacttgagcatccagtccactccatcgtgatgatgatgatgatcatagtattggtgactacagctaaccctcattaagctctcactatgtgccaggctccgttccaagctctttacaaataccaactccttcaaactccccaaccaccctcagaagtagcgtttctaccccgattttatagatgagaaaattgaggcattgttaaataactctccaagtttatacagcttgtaagtggaaaagccaagattcaaactcaggccatctgactccagaacctgcacatcagactgccccgcacttaactgttgttggtaacagttagttgtccatctgcttagcatgtccatcccttctggggttggctggggcaagtcagggcccaactcggcacagccagctccggagcactaacctaatgggggttttgcaagactcgggactgtgtgcttcacctggaaagtgccaggtgtgtggataagccatgtgagcagctggcttcctgggcaatgcccctccccacttcagtgtcccaggcccctttagggcccagccctccaggcactgtgagctgggaatgaggtgaaggaggactaggcttaccctctgtgtgcctccattttctcaccagtaaactgtgtgtgttggatcttacgatcttctaaaataactccagctccaaatgaaggccagtggacccatgaacacgctggctcttgcccagtgtgctgagaagagggcaggagggaggagtagggtgggcacggcagggcacagggtgcagggcaggtgggttcagtttgatttcaaagccgactgcccgccgccccaggtgctctggtgtacccaataggggctgcattggccaggcggcctaggctctgcgggtggagtgaagatttctctacctcccagtttctcccttttcagctctggtaggagagaggaagagtgaagaggaagtcaaaagttctgttcatctggaagggctgggagttgcttcctgggatggggagctccgaagccaattcagaagacggccccggggtctggcggggaggcccaccgctgcccagagggctcggccggccgggagggggcgctgtgtcctccccacgccctgcccgcgggctcctagcagcgttcgccgcgctgcaacgcaatgcgcgcccggctttcccctgggcagcgttcagtgcccgcttgtcctgcagggcaccgccgtctccctttcatcctggggctcccaggtccaaagggttcccagatccagcctcttgcctgaaccaaagtggccaggcactcagtttgtaagatgaacaaatgaaggaaagaaggaacgaatgaataagggctcatcttgcagagcgttcgcgtctcagcgcgcaccaggcacatcagtgccaaaggtgctgggggtcgggcccagcgcccggcgcggctggaatgggggcggcgaggagctcctcctagccagccgcagggcgggaactgcccaaacgcaggtcgcagcctcactgggttccgcggcggctccgctcagtagggaccgccctgttccctagcccccaatagcctcgccctcataaattcacctgagcaccctggcccaagtcaccccagatccctgggacttcccaggccccgacctcggccgggcgggaggctgatcctttaccgcggcccccttcccccattcccggcttctccccgggctgcggcggccgccactgctgccagcgcgccccgaggactgccgcaaaccccgggcgcagggaaaggggatcctggcggcgggacacagagagcgggccgggggaaggggagggaacggaggaggcgaggaggagctgggagggagccgaggggcgaggcgcggaggagggaccgaaggggagcggaggggagagggagggggaggaaggggaggggacgagctgggcgagggggcggggagccgaggcgaggagcggcgcggaccgtgggggaggtggcgggggcgaggccggcaagaggcggccgcgggccgggctgcgtcgggaaacggcggccagacttccccgggaaggggcgagcgagagccgggccgggccgggccgggccgcggggccgggaagcgccgagccgggcatctcctcaccaggcagcgaccgaggagcccggccgcccaccccgtgccgcccgagcccgcagccgcccgccggtccctctgggatgtccgtaggacccgggcattcaggacggtagccgagcgagcccgaggatgggagggcacccgcagctccgtctcgtcaaggtaacagcccgccggccatccctcgagcgctggcgcccccggcccctggcggacgcgggacggggctgggctgtgggtgtgatgggggcgggggcgctgggagagccgtgcttaggtcggggaaggctgggctccggggcagcctaactctctggacctttggagccagggttgggtaggcagggggagactcaggtgagaaaagaaatcgtggcgaagccgccgggatgttggcggaggagggggtccgcccacccgggtagccggctccgcgccaagaatcgctctaggctctcgggcagacgcctaggggaggggaggttccacctcccacgcccttcctgcagacctcggccccgggactggagactctgaagcggggttcccacctcgccccagcgcccccaaacagctccccgactccgcacgcccccgccctagtcttgggagcgcgtcctgccccttcccctccgcggcgagctgcgagtccggagagatgaatgccgcccgcgcctgcgagcccttgatcaatatcgcagtctcgggggaggagacggtgcctctggcggcagttcctgttccccgaccgcggctgggagcgcgacgctcgttctccgagcctgggcacccgcgatccccgcgctgcgcggccgaccctgcgacgcggatcgggcgctggagtttaggaaagtagccagaccgcacgtccagcgtctgcccgctgaagttcgtgggcggtgggggcggcccgcgggttgtgtgagccagggaagggccgggaggccggcagtccggcccgccgctcgtgtcaggcgtcacttgcagccccaagcgctttccagagcgttttggttttgcagggtataggcgcgcccgctgcagccggccggagaggcgggtgggcctctgcgctgctgccgggacaccccgcttcgcgccagtctgggcatcgcctcacccggggctcgggactccgcagggtccgctccagccacaaacatagacaccagcttgacccggctcagggcattcagagcgattacattcaagagacttcggtggatttgggggaggggtgcggattggcggaatttcatttttccatcagttattaaaccaactgtacgtataccggcttaccaagtggtttgagttaaaccaccaagatttttaaatgcagcagctgctgcttccttagttgagacgttacaagttactgagatttttctctaatcctgcccctccccaaatatttataaattgattcttaaaatgatcaagggttggtcttactgaacccacatcccctcccccatccgttacctgagggctagggatgaactcagattattttctgggcgttcgaggagacagacaggtgaggaaggtagaagaaaaacatccagagaggtcgagtagttggcactgaatgggaatagtttccaaaaggctcgcgtgtaccgaagcctggtctaaatgcacaaaccagttagaccaaattcagtcttttaaatggattcaaagaactgaactgcgggtgttttcttttctttttttttttttcaggtttacgcggaaatagatcaatgttctttttctggcctttcatagaattgtgtgcaaatctctgtttagaatgatcatgttttccttaaaaaagtctttttatttcctttgttcctactagatggtggggtgtttgccctttatgcctggcctaataaactcagtaggcattcaataaattccagatgaatgtggggcagtgagtgaatggccagcgaatgctggtttcaaacgttggttacaattaaatagttgcttttcttcttttatttatgtagcatgtacaattcactgggcattattctacctgctttgcaaatattaagtcatttagtcctcctaacagccctaggaagtaggaattattcctgagacacagagaggctaagtaactggttcaaggtcacacagccagtgagtagtgaagtcagaattcaaacccagacactctgataaaaggctttgttttgtttgcttttaccagaaaatatccttttttttttttttttttttcaagacagggtcccactctgtcgcccaggttggagtgtaatggtgtgatcatggctcactgaagcctcaacctccctaggctctggtgatcctcccaccccagcctccagaatagctgggaccacaggcatgcaccaccacacccagctaatctttgtattttttgtagagatggggtttccccatattgccctggctggtctcaaactcctgggctcaagcgatcagccagcctcggcctcccaaagtgctaggattacaggcatgagccaccatgcccggccattaccagaaaatattcgaagccacctaaatctcactctagagctcagccagatgagagctcaggtagttttgtcagcatgagagtacaaatctaggggatttagggttaatcccaaatccagctccatccccaacaagtcagccagtgttgggaaagggtccactctggggcctatattgtgggcctcacactataacagttacagagtcctgggggaaaatgtgtgtgaatggggagagacagggtgtgtgaaagtgtgtgtgtgagtggggagagacgatgtgtgtacaagtggccatgagtcaggagaagacagacaagacattgtctctatccccagggaggggcaggggcctgagcacctcggagtcagccacacacccactgcatctcctcgtagggagatggagtgtggctgtaaacatgggtcccagtgtctgtgaggggtgcagaaggcaaggcctctggatggattctaacaggagagtgagctcccaggagggagctggctattgttattcttatataagccaatttagcagcaataggcaaagtttgaaaaccagaatggaaaatgattgcaacctcactcttttaatctggctactgtataattcatttaaaaaataacccccacaggtccccttctcaagcacctgtctgggcacagctgtggccattgggcagccctctcctcagtgtcacagcccaagtctgtttcacgttactcccgaggctctgcaggagactgtcaatgtctgcatgttgcctgtgagtgaatggactttgccatccctatatcggtgcatatctgggccatttccaagttgtttctttgattaaacgatatagagccaggttttcgaggggagcgttggcaagaggcatgaggaacgcgaaacagtgagcccagggtgggccagtgggctgctgtggcgtgcgggactgctggcctggccacagactgggggcaaagacagggaggggccaaaagccaggccaagccccttggatttgaaatgaccagccatagagaggagtgtgtagattatggaaaagttgaacactcacccagagccagtgaggacgagctcaagtggaaaatccatttctcaccctctctaacatttggctcctcaaaagcatcaacctccaggttcagccacacataaggagtttgggggtcaaggtgccaccaccccaagtgcccgtgtggcctagaaggaagcagttaggtgccgggctgataatttcagcagctattgaaggggaaagaccatcagcctgggagtcagtgaacctgactctgatcccagctctgcctccaatcagctgtgtgatgacaggtaggtcaccttccctctctgagccacagtttatctgtctgtaaacaggggtattggactggattctctgttatctctcatgtctctgtgaaaggtctgtgttttcaaatactccttagggacatgacctcacatagaaagaggggggtgccacgaactggattcccagcactcccccttcccagctctgctcaagctgagggaccttggaacatggtacttggacctaagtactctctctgggcttcagtgtccccagctataaaatgggggaaatgcctaactcaggaggttgaggtaaggacaaaaggaattaatacatggaaagtgcctggaacagtgcctggcacagtctgctttcagaaaaagctgcaaggtggctactctcagcagatataagttaatgcaggaacagcaactagcagctcttggacatgcaatatattatatattttttgcatcttttacccttcacggcactgagcctcacaatccgttgcacagagtaggtgtttaacaaatgtttgtcgacttcatggatgagtttattgttgcttcttccatttggtattgtacaattggaaagaacccgtttctgttcccaccagatgcagatgtcaggtcgaaacagaaggctgagagatgcttaaaccaccctagcagaaaagccatctctgatgcagaaaggactagaactcccccttaagcccactgtggttattaaaaaagagaaaacaacacacaaccagtgcagcaccccagtgatctggagaatcccttgagggtagagcctcagccagtgaaactccagcgcttttgccgtgtctggaggagggcaggtcactaacagtgatctgggccgtttcttcctcagtgaaaagagggagtagggtgatctctcccagctctgattctaccctaactgctcacggtatcaaccaaagaagggtgagcccattttgaacgtaaggccaggtcgagatttcagctgcagttttaatagtcaaacaatgaatttgttaactacaaatcattcttgtctacctaaattcagggaggtccctgtcagcagagtccctaggaattttttttttttttttggagacagggtctcactctgttgcccaggctggagtgcagtggtgtgaacacagctcactgcagcgtcaaccttgtgggctcaagtgatcctcccacctcagcctcccaagtagctgggactataggtgtgcatcaccacacctagctaattttaaatttttttgtagaaacggtcttgccgtattgcccaggctggtctcgaattctcaaactcctgggctcaagcgatcctcccacctcagcctcccaaagtgtagggttacaggcgtaagccacagtgcccagccttcatccttttaaaatgcttgtctttggacttgttgctctaggccagccatcccttaccccacccagtgtggcagtcaacatcttcttgtatgggtgggaacagcagatgaagcaaatgtgggcttgaatccttactctgccctgaagctgtgggcaagtcacctcttcatctgtctaaagcgggggaaataatacctgctttatggcataatcataatgaccatgagatgccaggtgtgaaattatgcacagttgcacagtgtctggcacacagtaagtgcataataaatattagctatagtagtcacttaataaatcttaccaacttcctcagtctaagaaaggccatcaaaaggagaagtggtgaggggatgggggtagaggaagggtatttggcgtatagaatctcttcctgcgtcagagcacttttcacagtccctggggaaaagggatcagctaccagccatcagctgagcttgaaggtcatagacagacctgaacatctgggatatggaaaaacctgacagtaaaagtagatatgtagggaggataatacgaaatgattcactcactgatgcaaacaatcattttgaaaataactagctggattctattagacaacagattcttaatcacttgttttctgagtatgtggtatccgcttccacaaaattgaatggatggcaggaagggagggaggcagacttcatgaaacaggcatgtcagaatctggctttggaagacgggttccccttcacgtagaactgcggattcaaatgctttagccaaacatgttctttggcaactgtccacccagcagccataaaactgtttctgggacaaatgaagatgtttgcggctgttctttctgccctataagcacaggcaatttgtccatctcacccgcctggcactgttgggcccagagagaagcctcagcgaggtgctttgagatgggatttgtggggtgtgcatctgcccccctccgcatgtcagctggtttccaagccccagccagtctggttgggagccagtgcgcctaggtcagagcccagaaaaactggctagactggtccagtcacttcgtggctgcagaaccagggaggcagggcttgttctagactgaccgctatactttagagtctacccactggagttttaagaggtagtgggggctatcaggaagcacagtgagaatcttagttgaacctttgagtgctgggatgtcaggggctttaggagaattgggacaatatattggtcatcatccctggtcagtaccaaagcccacagagctgaaaggcacctgcccagggtgaaaggctgggacaagtgatggccgcagcattgccatttccagtggggagtgccctccctctgtgatccatccacctctccctccctgttttcccagcctctttggcaaggtgtgtgaagggctcatttctagaaagcccttcctagctcagcagaggccagaggtaccaggctgggtggggagcctgtgcacagagacagggaaaaggagtgtggctgggggacaaggggctgggctgggtgggctggaaaagcaaaccgggtccaggcggggttttaccctggggaaagggctttaggagagtccagggccatctgaggcacagtccttacaggtccaggccccctgcactggggacccaactgcactcagagcacgggcctggcagggtgcccaagggctcgctcagggtggatgatttcactcttacggaagatgcggagacagacagacagtgagagaagcaaaaggggagggagaagaaaaagacctgcctgcctgccttggtcattcttgcttttaactttctccctagcatccaagagagcctatgcccgggttctgaggccagcggtggcatctcctggaaacttcctctctgtttctcacaagaattcctccacccatccctatcctggtgcctgggtgcccgaagccgtcctcagctgttaggagagccttcggcgcagagatgccccagatgagctcccgccatgatcccttccaccacccccagggctgctcctcctccccagaagcagggtgcagaagggacaggatctgttgcctctgtgggcctgtgtgtttctcagtgggcatttttttctctctctctctttctctctctctctctctctcacacacacacacacacacacacacacacacacgctggtaccctggcgagtgagctactttgcagtgtttgtaacacccgcacctgccacctccctcagaagccactgtgtggtcaccacctctcctctgagcatagccagacctgtacggcaggtgtgcaatgccacctcaaggccagggttagaggctgacttccagaggagcagctgggcacctggggaccacgggcttagctgggtgagtgactagcaggttagacagcctccccggcatccctcagctgcccgtgcctggctgggagcccgagagactcagccactccttcatcttcccagacgggtagggcaaggctggtccttggagggaggctggtccttgcgtcctgggcttggtcttggtctaagccacgcccttccccttcctctttctgccaactctgctcctgtcccttgcctacgcctcccaggttcttttaagcaggtacactgtttactggccaggtgcgccatttactgagctgctgttgcactaaggcccacacaagtgaccccattgagtcctcccatccccttctagaggggaaagaacctgatgctcccctaatctcttgctcctcactcctggccctctgcctgagtcgcactgttctccttcctcccctgccaacccctacccagcagaatatacatatatgacacttctcttacaggagcttctgcccccaagtctttctgtgccaatcttcatctgtcatgtccaccaaagtcttcctgaactggccccacctcctcctccaggaagccctccagtctaaatctgtctctcactggttgttcctttgttctcacctcatcccgtcccctggtgtgagcctctagctcatcgtggatcctgggctgtcccacaacatggggtcttacagctctttgatgtatccccccacagggggctcaaaaacacctactaaccagattccacatggacccctggtgacccacatctaacctgagcccttgttcccaccgtagactatgagctctgcctagaccagaaagattcccttacaaaacaaaacaaaacaaaaaaataacaaaacctctgtgtgcccagaacttagtccagaactgtgcacacagtaggtgcacagtagatgctgaactaaatggagggtctctccctgctcccactccccaatgaacgtctgtctgagtgtggaagtgctatggcgacagaagacacaagtggcaagccagacagataggtccctctctgcctccgcgtgtggatttgtgactcaacggcttatcaagggctacgcggcagcgcggcttagtaacattaaaagattccagcactgccctgtgttccgcctccggtccccatagcactgggggcgttgtccacgtgcacgcaagggcagcatgttgcttcatgagcggttctggacagggatggtgggagatgttgctagagggaattgtggccctgggcttagaaacaaaggggcaagaaggtctcagaagctggggcctccagagagcagggtcagggcactctagcctccaaatggggactggggaggcggcctaggtggcatcctggggttccctccctggtgctgtcctggttctgctggtcatgaggcaggagtagccaggcaaggcaggggcgccaagagcactggcattcctggtaccttcgtgagatcccgtccgttggcatcccacccctccagctccctgtgagtcggtgtgggggtgcagcctggggcgtcttttctctcctgatggctggggcctcatggcctgactgtggaagctgctgcaaggctgtgaaatgcagggcaggggggcctaggagtggtggggctcacatgcaccctggaggaaggaccactgtccctaaagctgacagggcaggagacctggggttggagctgactcagccacttcttggatgggtgaccttaggcaaatcacatgacctctctggacccttgtgtcctctttactggaccgaccacaatgcagaatgaaagaggaaatgcctgtgctgctgcaaggggcctgctcccaccaaaggccagtgagacctgctgttttcatgggtgggagtcccaccccaggactcccctcagaactaagcccaactatcactcaagacccgcctcctccatgaggccttccctggtgagccaggcatcacactctgtcctccagccaaagcagggctctcaaaccagctgtggggaaggaccacatggatttttccaatccatggccaactggcgtgtggtcctgctgtgtagcctgcaccacgtgattcacctggcaagtctgacagcatctgaattggtctagaccctgtttgacgagatgagtcttgactgcatgctcggatgtcaccgcagggatggattcacatgaaatgcttactctccagttttgtacttctcaagttgtagaccaggaaccaattgttggtaggttggcaaacttgaccagtcggaccagtcctcaccaccctttgaatagcacgggcctaaagccctcctttggggccagaattcactgcctggcccagatctctggttcacccttcacacagcctgcccctcctgccatgcttcttgcacttgtgtgtctccattgcatggatgtgagtgatgtagtggctctttctggcagccaaggctgggcgacggaagaaggaagaacccttgtccaggaggaggaaactctttggtttactcagaccccttacccagtggcgggttctgagcaggccccttccccctccttgtcacactcatcaatctgcacttggtgacaaggtgagctgaggacccatgatcagtggtcgcagcccctagtggggcaagggcagccttgctctgtgtgggttccccaaagctcacaggacttagccccatgctgttctaccccttgtccccgcactcatccaaggtaaaggaatcccacttctccagggcccagggcccaggacccggctctgcctcctgcctctgaggtgccggccctggagaggctctggtggagcctcagctgggtgagctcagctcgctgactctgggaagaggctgctgttcaagctctttctgggctgcctcattcctcaactttggctgcatcagcaggcagaccttcctgcatctcctgtgcaccccctgcaggaggagatctggaggagctgacccagcagggccaggacagagtgagtcaggggaaggagttcccatctgcccagctggccaggaaaggtcgtttccaccagtccgctgccttcagactgaggccaggaggtgggagactgactgatccaaggtcgcacagggcattcaccaagaagagtgcaatccaggtcctcttcctgccttgaaggtgcctctctcttgtaatcccacactcttcccaaggtccactctacagccaccttcctcccctgccccgcccccataatgggcaggcaggcaagtgtcttcaaagctgggatggagcattgaaaccctccaacccagggcttcccaacctcagcactattgacatttggggccagataatccttcactgtgggggctggcctgtgcattttaggatgtttatcagcattcctggcctttacccattaaatgccagtcgcacctcccccttcctgattatagcaaccaagaatatcttcagacatcaccaaacgtcccccgggaggcaaaatggcctccaggtgagaatctctgagctggctgagttatcctcacttctgttgatgcttcagaatcactggaacgcatttaaaaaacataagggtccctgggctccccacaggcctattgaaccccaattttgggggtgagttgtgagaaatgggattttctgtctcccaggtcaggtgtcaagcactgtctggaaattctgattttgtctaagtcactgcctttacaagcaaagaatcagaggacggggccgttgcttgttttatgtctggttagtccttatttctgccctaaatattccctgttcggtggggtttggcggtccagcagccctctttaaactgacctttggccttagaaggcagtcgtttttccaggaaaaacagccccaaagcctttagcatttttaaataaagtagaacctaattttcagccaccagtttcactcttcctttctggccctctttaaatcccttttaaaacgcagctccataaaggacatcttttctctgccgacaccgaaatccccctcactttacacttgtcagagagcggctgagccgagagcacagctgatagtgtcacctgcgtagctggtgtctctgcggctgtccccacacctcggctgtgcctcccacccactcagggacagtttcccagtgtctgggagccactcacagctaacagctcccaggggcaggcactggatcagaaccctgggctgggctcccctcttctgtgagagccaaacagagcccttcctgagtcccatccattggcagggtcctactgttgtccgccccctcgttcccactgccagctctgggggagctgggctgcagccaggagccagagtttgaaaggcaaaggaaacctgtacctatgtgtcttttggaggatccaggcttgtgatgaggaagaggagggaagggaaggcaggcagggcaggcagggaaacaggctgtgctgcccaggggcaggagcatggctccaatcccagtccctccagttactgcagtcaaaaccctgggtaagttactgtctccgggtgcaccagtctctcgtttgaacagtggggagatagtaaaggctctgacttgcaggggtcgagaaggattaaatgaagaaattcacagggcctggcactgtgcaagccttcagtaaaggctgaagaaagaaagaaggaagaaagaaaggaaggaaagaagggagggaggaaaatggaagccagggaagactgagaaaggtagagtggttaagacagggagagagcaagatggggaggagagaggcaggaggccgagaaggcacgggctacaagaacatatccatgagtcaatttgagagcaaatcatacaaagacggggagcaagtgaatgcatgagaggcagaaatgaagggaagacaaggaggatgggagctacgctccgggcaccccctgcccccatgcttagcaaatccatatcattgacctggatgtacactccattcctgtaggtgaccactgctggcttctgggaaagagtggagctggaaagtggggtacatgccctgagtgggcagggggctgggcaaggggcacttctgggaagaaaagccaagtcaggaaggaagaacgtgcaaagttgagtaacagagtggtgaccatttgtgcggcctgcgcacctagtcccatgctgttttttctttttctttctttctttttttttttttttttttttttttgagacggagtctcgctgtgtcacccaggctggagtgcagtggcacgatctcggctcactgcaagctccgcctcccgggttcatgccattctcctgcctcagcctcccgaggagctgggactacaggcgcccgccaccacgcccagctagttttttgtatttttagtagagacggggtttcactgtggtctcaatctcctgacctcatgatccgcccacctcggcctcccaaagtgctgggattacaggcatgagccaccacgcccggccccatgcagttttatatgcaccatattgttgaatctctccaggagctttgggatgtgaatattttatccctatcagccccatttacagatggggaaaatgaggcttggagaagttcggtgattctcccaaggtcacacaggtaggagggggcagataaaagattccaacaagcatctctccagccccaagtttagagatttgaatttctactctcctgtacatcctggagccagggcatattcagacctggaaaggaatgtagagaacacagtgacctccccattttacagatgaggtaactgaggtggggaggtgacttctctaccatcacggagcaagttcagcagagtcagccctgtgcttcccacccagagtgctttttcctctagcacatccttctggagtccaaggtgcggggctatggcgggagcaaggagaggagagggagctcctgctgagcaggaggaatagagaggaaaatgagaaaaaggaaacagccccctacaatctcctgctgggaatcatcatgagaccccatggtcagagggggcagaaagtgaaaacccatctgttcacttattcattcagtcatttattcattcaacaaacatgttggggcctgctctgtatcgggccccactgaggatacaaaaatagccaaacacgggctgggcagggtggctcacgcctgtaatcccagcactttgggaggccgaggtaggtggatcatctgaggtcaggagttcgagaccagcatggccaacatggcgaaaccccatctctaataaaaatataaaaattagccaggtgtgatggtgggtgcctgtaatcccagctactcaggaggctgaggcatgagaatctctttaacccaggaggtagaggttgcagtgagccaagatcgcgccactgcactccagcctgggcgacaaggcgagactccgtctcgggaaaaaaaaaaaaaaaaagccaaacacaggccttgcctgcagggagcttacaactcaagcttataacagtacatctggaaccttggaggggcgtgtgtgactctggagctggggtctcatggcccttgctgccctggggtgggagaggcaggtgacccactatttctagccctgctgcaaggttttcttaggggagtagaggcgtgaagtagcagggagggcgggcgggggcaccctgagccggggccccagggagaaaggccgggggcggggaacacccaggcttcccccctcccttaactgtaggcaggagattttcctttccattttttcttctctgtacaacagcaatttaagttaattaaatgtaacaataaattatttctcgcctgcctggaataatctttcagtgctcacccactttgaggggaagcactggctctttgccttgagatgggaactggttgtggctgtcacagaaagaggctgtgggaggagggccaggcccgaggcgggatggggagaagcctgggcagtcaagagggctgagaaaggacccctggcatctctgtcctctgtgcctagtctagttttactctggctggtctccacctgtgggtggatgagaaaaaggtgccccatgagggtgcccctctgctggtacacatcttgcaagtctatcccccactgacccctccacttggcacttctgtagcaagaaattctgcagaaaccacacaattgcgtgtggggcctgccctgctcttgtattcaattagtccgtaactacagatatatcccccgtaggtacagagacgtttctgaagagttgattgcactgacgctttatttctgcaaaccagatcccagtatttaaatgcaacggcggacccagctttttacagaaatcttcatttatgacctcatttctttttcgcgtttagattttcttctcttgcctttgcttaaaataggctccacctgaacacagtgcaaagcaaagcagagtcagaagggtcggatattgggattgtggagcctgcaggaccccaggacccaggaccttggccagcagatggaaagtgtgggctggggcccttgcctctggggtcaccaggtacatcttcgatcttggccacactggagagtcaagggcttctctgggccccgagtcagggtccgccagagtctcccaggccagggaaggcaacaaggcctggtttcactctgacctgctgaaccgcctccgtggaacaggtgactgtcggctgtctcgctgggatgatgagggtgacaagctgggataattcactgctcaggaacctgccatggtgctccaggccgactggatccatctcaacccagtgtctgaggccctccgcaggcagcctgccacacccctacaagctcaggaccctccccttgccgggaaggccctctccctccctctgacagccacgtccactctgccccgacctccagctcacctcctccaggaagcctgccctcatggccatggtgctgaccccatctgaaactccatggtccccctgccctcagtctgtgcctcatcttgccatcgtcatgtatgtgtgtgtctgtctgtccttccccatctcttctgagttcctttccttttttccaaatcatgtacttagtcctggactctttgaatgaaggatcccagaccaccaagggggttggagacaccactcaatccagtggatttcaaacctaaaaagcaacttaccttttaaatggaaaaactccttcccaaagcaaggcttcctgagaaggcagaaggacctggcggaagatgaggagaggccaggtccagcctgcggggcctcccccagggcccggaagggacatcaggaaagctgctccaggccagccctctgcagtggaggtgcattctggggcccagaacagccaagctgggctgatgaccctgccgatgcttgtagggactttatattgcagatgcaggtctcctggttccccacaaatggtccatctcccagtgaagtgggtaagaaagaccacattgcccccacttcacagatgaggatgttgagtctcagaggagtcaggtgactcaccgaaagccacacagccagtgacaggactgccttggggctcagcagaagggcgagggaccgtgttgaaggatggctgtccagctgtggctctgccgaaggccagtgcggtccctgacccctgggggctctggggactctcccaagctgagcatcagtgctagctgtgaaaggagagagaaaacaggctcccttttccctgttccccaggaacttgtaggaaccaggcctgagatgcctcagctgcctccaggccacccctccctccctccagtggccttcaggaccctccccaaaaggttaattaccgaatcatcacatcaaaggaaattgcacttttgtgccttaaagaccaaactgagcttcaacaacacggttatttatggtctctgataagcattttctgggtgtgattaacctttgtaccaaaatcacactgggaattgggatggcagcttcattccagccccattctgtgctggccctgggggtgggggtgtgggtagcagctgctgcaggctggagcaggccatgtcagaacctggccctccaccccctccacaggctcctgcaccaccttcctccccactgcccatcccttcttccaaggcgctgtcttgacctgcgcctggccagccagaaggcgcgactgtcttcatggttcatctccttgaaagacagcaggagcacctgcttactgaatcccagctcctaaaaacagttatgtgacattgggtacatcaactaccccagacttaaaatgggagcatgatacccgcccagtctgctttcccttccatcccagggacccactagatctttggaaaatccttttacgcgatgctataattgagccgcacgcacccttggcctcagactttaaccttgaaggtttggctctttggtgagtggagagatttgtagctcagctgcaagttttatttggagccttggggctgccaggctgtgcacggaagtgaggcattagccagtgagtgaacctcgtgctctgccagcttcagcttcagtgccgttttgattttctctactagttggaagatagtaaatcacatgaagtcttgaaaacttggttctgaaaggagcgccagtggctgggactggtgatggagtggaggagcaagaggcatctgagaaaggccaaaagcactttggtttgatttcagagaagatgacatgttcagttcaccccatttaccatatgcttcgactgtagttcccactgtttcagggtgctagttgttggtgagaagtggaggaagccaagaaccctccccgggaaaatggttttcatcacacacaccaactgcatttatttgcaaatcttcacactgcccgctccccaggttaagaattctccgtgtttttttttttgtttgttttgttttttgttgttttagcccagcatggtggctcactcctgtaatcccagcactttgggaggccgaggcgggctgatcacttgaagtcaggagtttgagaccagcctggccaacagggtgaaacctcatctctactgaaaacacaaaacttagctgggcatggtggtgcaggcctgtaatcccagctacttgggaggctgaggcaggagaattgcttgaacccaggagacagaggttggagtgagcggaggtcgcaccactgcactctagcctgggcgacagagcaagactgtctcaaaaaacaaacaaacaaaaaaattctccattttaagggcaaacaaacaacatccttgaaactttgggggcctgttcctgccagtgcagtaattgcctattgatggagatagaaaaccacagtggagcttgaagaggagatcagcggatggtgaagaggagatcagcggatggtgggaggaaaaatgcaggaaatctctggacttttcatggaagtatgattcaggaataaggcagaagccctcacaaaccttccacagagcaagaggtggcacaggcacagattctgctacagagcagacctttccagagaggaaaggttggtttgggaattttaagaagcatttttctttgcataacgcaacaccagtcctctgtgtttagaaaatgcctgtgtgaaccatcacattcaagagagggacacaagtgtcagggttctaggcagccaagggaagactagccctttgcctggaatttggcttcattttctgacgaatcaagatttgctctgctcctctgtgcacgccaggacattaagatgcgagaataagaacttatagcctgtatatttgccatctaattagtgtcttgggtcctaagtgctttgtgccgaggtggttttcgtgcacttaggctggtctaagtgctctacttgtgagcctcacgggcacagggtccagtgagtgtacagagtgcactgggaaaaggggtacattggagggagaactgagctgctttgctttggagagttgggcaggtactactaagcagacgggccctggaactggcctctgaagaatgcagagttgaccaggtgaccaggggtggggggtggcacagactgcatgggcagagggttgcagacatgagaaggatcccagatactgggagataataagtaattggatggaaatagaacgtgatgtgccttcaaggtgggggatatgaaagaccggagcacgaagcacagcttaaggattagatggataagtggaatgtcaggcaatggggctgatattgtcaaataggatgcctccagtttcttttctttcttttttatttattttatttatttatttattttgagatggaatcttgctctgttgcccaggctggagtgcaatggcgtgatctcggctcactgcaacctccacctcctgggttcaagcaattctcctgcctcagcctcctgagtagctgggattacaggcatgccaccatgcccagctaatttttgtatttttagtagagatgggggtttcaccctattggccaggctggtctcaaactcccgacctcaggtgatccgcctgccttggcctcccaaagtgctgggattacaggcgtgagccactgcacctggccagtgtctccagtttctttaatttgcctgtggctgagctggctctgggagccctagtttgagagagagagtgcgtgtgtgtgtgtgtgtgtgcgtgcgcgtgcgcgtgtgtgcatgtgtgtgtgttgggaggtggcgtgggcagatgtggggtgggaaacgaggagtgatgatttctagtccccttctagaaggggcctctggccctagcatctgaactgcccctctccggggacagagccgagcctgggtccttgctgattgctgagcgggcagtgcagctttgtcatgaggacactttgctttctgcttagctggcaagagccaccggctggcctggtggcctcctcctctctctacttctgcattttcacttggaaaatgagggtaaagatatttctccatctctctggagactgtgaagtttaattactgattaataaagtgttggaagttccttgaggccagagagatgaatgggtttgttatcatcactcctgagtcccaggcgcgagttggctaaccccagtgccatcttgctgagtgtcccgtgtgcagagcacaggatgggggtgtgaggctggggttatgcttcagaacctggagcttggtccagggcagagagacccctatgagagtatcagcaagggaatggagtgaacaaaaccactacaaactcaggcactaccgactcgggggaccatgtgggtgagtcatgggtagtggggaccaggctctgacgaggagtgggcactcttcccctggaccttggaatgtgggtgggagagaggggagcagagtctgccttcatcatcgggacaggactgggagggagtgggtaccgtgaaagggggtggccctggtggggtggggtgagataagggagaacattcccggcaggtgaacatggaaaaggcaggtcagtttgcttctaaggacagggagaaggtcctgagatccgaaaagggtgagtggagaggagtccagggaagagaggatggacacccctgaaggatatggggcaggcagggaaggagggatggcgtctggcttgggaagatggcgcatgagtggggcccgactggagtgaagcaagtgaggcatttcctcaaacctcagtaatcgcaatagataattttttttttttttgagatagagtattactctatcgcccaggctggagtgcagtggcgtgatctcggctcactacaacctcaacctcccgggttcatgcaattctcctgcctcagcctcccgaatagctgggattacaggtgcctgccaccatacctggctaatttttgtatttttagtagagacggggcttcaccatgttggccaggctggtcttgaactgctgacctcgtgatctggcctcccaaagtgctgggattacaggcatgagccactgcacccggccatgatagataatattttaatatcattactgactttttccctttttgccccaagctccaacatggcccagcactgttactgagcctatctttcctttaaaaagtttttgatattttgctcatcatggattttttggcgttaatctttattttaaaaaaataattatgttaaaatattccgtatcttgacgactaagattttcgatgctcccttcacttttgcactcaccacgtggagtcccggccccttgtgagaaggctgcgtgctgcctgggctggccaccgacctgcttctagcctacaccctagaagtctttgctcaccaagggacttgacaagcccctacctctctcccgatcttattttcctgctgtgaaatcccaagctggcttccagagctaagggtctgtgtctgaggctctgtagtgaaatttgcagttggtacagaaatgggctggggctgagacacctggccatggggttgggggcctcagaaggagcagaccccaagaagaaacagcagagaagtgatgaagagagcagcctcccatgaggcctcttgggcttcaggctcaccaccctgtctgggaactctgctggtggccgggcacccagctccccacagccagaggggaggaccggttacaatgctcccctctccctgcccctcactcatgcttcttaaccccttttgaatcaaatcccaggggaaacagccacctctcctccaacaactaaataaaaaccactaagttcagatcagttaacatatccttcttgagtgcctattgtataccagaaacacaatgtcattcattcatttcttcagcaaaattgagtgcaatgaacaaaatccctgcccctacagagcatgcagggctatttaaaggacttcaatatacatacatcatgtaagcttaaagggggtgggacagttagacccatttttacaggtgaggacactgaggcacacagaggtcaagtcccctgcccatggcaacacagcgtaacggggggctagacactcggcctctctcttgactctaaccctgtcgggaggggggtaatgcgatggttgtgtgggtgggtttagttgaagaaggggcagccctccaggtatagggcctatgccactcccttcccaactgggctaaaattctggaatcagagtgacacggagccttcagggaggttaaagggcaaaggtctgccctagaatagggtgtccatctttccagacacatttatcccttacctctctgtgcctcagtttcctcatctgcaaataggcacagccacaccaaccccagggaaaatttagtgtcacggcagatgtacaagagcttgataaatggtgaggcacaatttgtgatgacggataattaggcaggcggggatgagggcccaggaaactgttcacaaaacaagaggccagctctggaggaagggagggaagtgggtgcacgcatggggatgtcagcggccatggtggtcagcgggccggtgggagggtgtgtgtgtgtgtgcacatgcacacgtgtatatggtgggacaccgttggaccatgttcaggattccatggggatggaggtggcttcctctggccgcactcagcccctaggggtaaaattcgcctcttccctaggagcctgggctcctgatcctgtcagcttccctgccaggcccctccaagagcagggcaactccagaccctccaggcagagaggacccagaaggaggagagaggagatgaggggcgggtgtctgggaagcgactggatgtgtgacagggtgggaggggaggcaggcaggtgcagtgtcacccctgcagttttcctgggtgatggagcaacatgctcatggctcatggcacctgcctaatgtgtccttcgcctcctgtgcctgcaggcccttctccttctggggctgaaccccgtctctgcctccctccaggaccagcactgcgagagcctgtccctggccagcaacatctcaggtgagtcccctcaaccccctcctgcaagattcctggtcaccacaatgccccctaccccaggtatcccagagcctgcacacagaaccatgccctaaggcaggatttgcagagtcatttcctctccagggctccaagcaattcttcacatctccaccgagcaccgtgttgagaaggatcctgaggttgggtgtaaggttggtggggaagagctgcagttggttagtagcacctgccgtgggcacaggagtttgcagcaaggattctgagtagttatcttccctgctttagggtgggcacaggggagggcatcccagcccttgctgctgagttgtgactcggggaggcatcaagggacggaggaaaggctgccacagtctgtggctaaaaatgcccagagtgtaatactccacggtgctaacccgtgccaggcactgatcaaggactggagctgtattaacccaatttgcacaatgtccctctgaagtaggtgctgttgcccccattttacacataagaaaactgaggcacagagaactagtaagcgccagagccctgagtggagcacgggcagcccagcttctggttgtggtctccagcgccgtgctctgtatctctccaatagaaaagacagcatagctgcaaatattattaatatctgtgtcactttaccatttacagagtgcttttgcataatcatctcgtttcatcctcacaagagtgtaaagccgaacgtttgtacagttgaggaaactgaggcatgggagagttacataacccccatggcaccatgcagccagtacatggcagtgactgggacccaaatctaggtgtttgggctgcctagggcatgtcttttaaaactttgggtgtggtcctgggcatggctgctgctgggcaaaaatggagagggtccctgcacctgagtgtctttggaaggcttgtggaccttctatttaagtcttcaagcctctccttgattcacaccaactctttcatgaagcacctactacacagcaggccccacgcagggcactgggggaaacaagggggctcacaggctagtctgggcatcgaatccacaaatgcatgtgcgatgaggcagagtggaagacgcatgcttgcaaagaaacagacgcaagtgtctgcaggcgggcaggaggccttcatttctgaaggtggctctgtgggaacaggaggcctccacatctcatggtagctgcttcctggccagctgttccttcactagggagagcctgggggcagaggaacaagccctggacttggagaaggcacactgggtccctgtgctggctcacagaaggtgcctggtcatgtcccggctaggggtgggtactggtagccacagggatgagcataccctcaacccctcttgaacctcaccttgcccaagtgtagagggataggggggctgttacctgccccaaggatctcttatgagattcaatgtactaagttttatggcaatatttcacaaactgtaaactgtagagtgtcatgccagtactaggtttggtttggtttggtttggtttggtttggtttggttttagagatgggatctcactctatcacctaggctgaagtgcagtggcacaatcatagtttagtgcagcctcgatcttctgatctcaaggaatcctcctctctcagcctcctgagaagctaggactacgtgcacaccaccatacctggcctaatttttaaaattgttttgtaaagacagggtctcagttgcccaggctggagtgcagtggcacaatcatagctcactgcagcccagatctgggctcaggtgatcctcctgtctcagcctcagcaggcttttaaaaggcttactgtatagctggaatgaagggaaggtacttgccagtaattgctcataatgatggagggagcagggaggctaagcaggggtggtgcaaatccagggaggcttcctgaaggaggaattttcaaggtgaatattaagagacactgttagtgtgaactggcagaagagagccagtgctgtgagctacagcaggaggtgagcaaggaccagtaggtgggtttggcggaaggaccaggaagaagtgaggagggaggagtgggaaactgagaaggtgctaggagcccagagcatctggctgcaaagttgattaagctgtgcttggggaatggggaagtaagttcttgagcatgagtctggagttctaggagagagagatggggagggaggagagctgctcagaggctgggcctgagaggaaaggccctatccccagctcccccatgctctggggccaggttaggctctatcaacttgttcgttatgctcaggaggagagacatccctgagcccacagaggtgtcacctgtccttggagccagcaggccatgatgaatagtgttcattccctagtgatttgtactctgtgcccgtgcccccagcccagcccagcctgcctggctgcatggcacgcgatccatcaccctccacgatggcctctgataatgggccatttgtcttctgactcgtagacctacccagaccgacgggcactggtagagacagatggtgagggtggggcggaggggcgagacagatggatgggcgtctggccggggcggctggcaccgagccagggcctttggggggccttttacgtgcctcatgccaggaactgggagagagtgggtccccagggctgaggcctatcatgtggcagaccacagacttggcgactcataaaatcatggcatgagtatgacaatgccaggaggtaatagaatcatttactaatgacatcacagacaaatagaatctgagttgacaattacctgggttcatcagttctcatctctggtcttaaggtagtgaatgataattaataatagctaggccaggcacggtggctcacgcctgtaatcccagcgctttgggaggccgaggcggtcggatcacttgaggtcaggtgttcgagaccagcctggccaacatggtgaaaccccgtctctactaaaaataaaaataaaaaattagccgggcttggtggtgggcgcctataatcccagctactcaggaggctgaggcatgagaatcgcttgagcctcagaggccgaggttgcagtgagcccagatcacgccactgcactccaatctgggcgacagagcgagactctgtctcaaataataataataataataatagctaatgtttatttagtgtccactgtgtgttggacgccattccaagtgctttaatctcattcaatcattacaatactgtagtcaggaatatttttatccacatgttacagtagaggaacctaaggctcagagaagttaaacgagttgcccaaacacactaagcagttactaagcagtggctgcaagatatgaaccatgtgggcctgacttcagattttgccaccagcactgcgttatgcggccactcagagccagggtgcccagggcccggtgtagtcagccgtctaggggtgcagggccacccctgcagttttccgtacccacactaggtttgcacacggccccatattctcctccatgcctcccgtatgcctggcactgtactagctgctgggaaggcaaaagtgaagagcccacagacccgcaggacaggagggccatccacttgtcctgatggatcacacaccctacagaggcagctttcttctctgcccagccaaacagaaggcagctcagccatgaggtggccgagcaaagaccaggtttctgccaccctctccatgccaggggacccaggcagaggccctgcccattcatcccacagcacattcctctgactgggcaagaacgtgtgtttcacaggctgcccttgggccacctggctgctccccctctggacagcctgggctgagtccccctcctgggtttaagccaaatagggggaagggcttcccagcctcagggctgctgccaagtgcccacctccagaagccgctgatgggagacccgacgtaactgggacagagccaggttccagcttcctctgaagttatctaccatgggcggatctgccaagcacacgtggaccctgagcctgatgggaggcaaactgtgtaacctacctgggggaagaagccagtgcctgattgtgcacagcactaaataggccaccttcaaagggctcttacctgttcactaaagcagccctcccaggaccctgaccccgcagggtttcttccctggcaggtgggagccctccacacctctcctctgctctccctttgcagggatttgaggcagtctgaccagaatgcgggccccacgcatttgttctgtgcatgtatggggaaggaggaagatataggaccggtttttgcattactttagtccacttgactccagcagctcacccccaacctaaaggcctgtggtgacgtgcgctggtgagtgggttggttctactcccacatccccaaccaggaaagaccctgaaggcgtctacctgccccgtgaatgagggagtgagccacagagtgataggaacgttgacacctcagacacaccaagcacacacctgctccgggggtccttgtacttgcagttgcctctgctgagaacactttccccgcaggttttctccctcacttcctttaggtatctgcttaaatggtagtactttagaagccaccacactaaaagagcaccttggtcagcctttatctctttgcactgcttagtttttctccatagtatttctcactggttaacagaaatgtgtgtgtgtgtttgctgcctctccactagaatgtaagcaccatgaggacagggcatttatttgattcattattatatcccaagccccttgaacatttcttaggtagtcagtaaataacagctgtctcttggtatccatggggcactggttccagaactccccatggatatcaaaatgcagggatgcccaagtcactgatataaaatggagtagtatttgcatataacctatgcacatcctcctgtatactttaaatcatctctagattatttctaatacctactacaatgtaaatgttatataaatataaatagctgttatactgtactgtttagggaataatttcaagaaaaaagtctgtacgtgttcagtacacttttccccaaaacctatggatatggagaaacaattgtacttgttaaataaagagcaaagtcactattccttaatttaccaggagaggcactgtgggacagggagctgtcaggaggcgttggcacctaacagcacctctgcctttgtgcagctggttggtaaattggcttggctatttgcaaggttggattactctggtccaaattcctcctcatcccaggactatgacggctgactaggaaaatacctccacctgccaggagagcagaagaggtcaggcttttgtggcactggaactggagggaggggacattggcccaagaatcagaaggtccttgaggtccttatagccatcaagctgagtgacacagaaactgacttcctgccttctccccttcccagctaggggatggacaccctctctgtccccagcacctgtgaaatgatctttctctctgcctccttctcctgacttcccgcctgcctctctctatttcttccttagtgtcttcttctccatcttttttcctctgtctccccacctctctcctggcccacttggcctcccacctccctccctctccgcctgttttctcctcctcattgtagtcgggtggcttaagtgagtggcatgaattaagtcgtgcaaagcgcctttcacagtgcctggtttatattatagtagtgtccaacaaatgatccccctcaagtcctatacacaatttcccttctgaggccttgtccctacagggtcccagggaccccccactctcctcctccctggactcggtgtccgcaggacgcaggatggcgatctgaaatccttgtggggatttcagacacagagacactaaggcccagagagggcaggaccccgaggccttatgggaaggcaccgagcccacaaggcagtcccaggccgggaagtccagtggacagtgccaactggccaggagcgtggcgcctgaggccctgtcctgctgcctcctccctgcccttgtcctctaggtcccctcccttctaactccactccgcggctgaggcccttgtgcctttggccacgcccccccaacccccccaccccaagcccctgacccagcaggagtgctgacctttcactcggggatgggggaactttgtctcctcgccccttttcatttggcttctcctccccgttcttgcagcctctctctccctttcttcccgtctcacacagactttcaattccttccaggattttctgggctcttaatgtaaaggttgccactgatgctgtgtcaccagcgccccctctgtgcatccttaggagctgcgggggccaggagggagggggaggcgcggcgctgctggggaactggagtcgcagctctgcgatcgaggggcagctgcccagatcagggccagctgtgcagctgtgggcagcaccctgagctggcatcaaaagatgagcattgaaaatccactcccgtctcagtatctttggttactgattgtcttggaataagccatttggccactttggcctcagttttcttatctgtaaaacaagagagaattagcacccatggtggcatagtaggtggctgggaaccataccacagaggagaggcaaatggcttctgacctgcccaccccttgaaggtctccacgtccctggccagctgtggacggggtcaggcctttggttagagcccttagagctcccagcagtggccggtgcaggtcctctaggccagaaggcctatcctcagtggctggcctctgcctcggctctggcctcgtcctcgctgtggctggtgcccagtcctttcctgccctccgtgccttgcgaaagcaaggcgcaagaagactggccggggaagggaagaaggaagggcaggggccacactgatggagagggtgtgttccgtgtgttcattccagacgctgccacatggaacattacatttgagcctagctccctagatactgtggatgaatgagtgaggagtgaatgagcaagctactgaggaaggtacaatggtgccattaaatgagatggcatatgtcatgtgtgcctggcacacagtcagccctcaacaaacgctgctcccttcctgctgcccccttaactgtccctcaccccctgtgactgactcacaatgtggcgtaatggaaagagcactagatttagagtccaaaatacctgcctatgagtcttggttctttcacccattgacccatgaccttggaaaagtcacctaacttccctgggcctcaatttcttcatctgtagaaaggaaataatcacattgccagatgtatgaagatcaaacgaaatagatgaagagctttgaaacagcagggcatggcctctatacgatcctcccctccccgcggccacatgcccccagctctccccccaagtccctgtccccgggctcaacactgtcagcaggatccaggacaggttaaaatcccagcctggtacgccgttgcctcggatggccctgcttcctcactccactgcttccactgccactccgtgataacattcacagagactccgctgtggcacagcacctgggcttggcccactccagccgcctggcccgcagtcacctcgtgtccattaagccccaatccagatttctttctctttcaattaagccacttggcctgaaggcctctgccccttgagtcctgatttgcacaaatgccctatgaatagctttgattagaaagaaaaaccagcatttggtacaagtgctgctcggcactgccctgagtccagcagagaaagggagccaatttaacccagtgctgtttcctgagagactggggacaagctaatttggggaggagatggcaggcagccccagccagggcttggcagctgctaaggcctcggcccaggcctgaagaggctgcccccacacgcgctggttcatggttcctggccctccgtggcttgtctgtccactcttgtgccaattctaggttattaacctggggacactggggctcaaaaggactggtgtgccagcctcactcagagggaggcactaaaaggcagagaaagaaggggcagcctcaggggggtgccaggactgtgccagcccccaccctttggaggccatatccaccctcccctcctgaagtgtcactgggcctcaactctgccccaacatcctctctctctcgcgtgctctctctctctcctccaaaaagcaaatatttggaaggggactttgacatcttctttctagttcagatgtttatatctctttgagtcacagacccctttgagaatctaatgaaagccgtgggcccatttccccattaaaatgcatgtatacaccaatattttcattacattcagggtctctgtgaactgttgaagtttccagtgggctgagattaagaatttctgatctggttcaaccacttgattttattatagatgaagacaagacactaaggcccagagagggcaagtgacttgcctatgatctcacagcaaattagtggcacagcccattctgaagcagtgggcccagactcccagttcagtgtgtcctttccactcccccagatggtgtctccctccctttcctctccatagctcacttctccatcagtcctgtcctagggccctgcacagaacaaagtacacgtgacgtatggtcagtaagtgtggttaacaggccagccggaagaaggaacaggccagccggaaggagggccaacttcatttagctgattcttccctgcagggccagggtagatgtggtttgattgcagagacgtgaggggctaggtcaatgattggatgggtctgttccagggtgttcctgtgatgtctcagagctccaggctgtcaccatgcgagggaccaagagaagtgtccttaggctacagagcaggggaccagaagcatgcccaggcttcctctaaatgccaggaccttagcttttaacaccacctccagccatctctcttcctcctctgctctggaacccatgctggctccctagtaccatagcatcagattcagatttcttccccttgtgtcttctttgcataggatgagctcatttctgcactggtcattgttgtcatcctgtccctagctggtgtgagtgggaacgagtggggaggtgggcagaactctggaatgtcctctgcctgcctggggccttggccggatatcttgctgtgccttaccagccgtctctgcccccaggactgcagtgcaacgcatccgtggacctcattggcacctgctggccccgcagccctgcggggcagctagtggttcggccctgccctgcctttttctatggtgtccgctacaataccacaagtaaggaagaagtggagggtggaccatctgctgggaggtgggacaggatggggagagcttggaggtgggggaaggaagaatgacgatgacaataacagtaatacctcttgtggggatcgcccctgttttccaaaggtcagcgctgtattctcctgggtgccctgtgctcattactcgtgattctcacaatacccttgcaagacactatcacgcctcctataactaaggcccctggggctcagggaggttagggaacttgccccattggcagctggtaaggggtgaagctggaatttgcatccacgtctgtctggcactttcttctgccattaaacttcaggttagtctgtttgagcctactgtaataccatgaagcagggcaggaatcatcagagccccagctgtgtggataagaaccttgagtcgagaggttctgaggcctaccccgggccctccagccaggaggcaggggacccagagtttcagatgcacaggcacaggctcaacttgcatcctggatttgtaggtggagtggggcaggacggggttgacccagggtccgtcggatacttgatcctcatgtaaacacctggctccccggaggcccgaaacccccagagccgggctttgcagctccctgctattccgcctgccactctcagaattaatttgctctcccctgtcaatgagtcaggtccctgcttatcaagagagcaacagctgtgggccaggagccctaacctacctgaggggaggctgggggcctgatccctgcaattggggcctcctgtgtgcacccttgggtccttgtggtcttgaactcagagtcccaagagggcacaggggtgagcccagacaccatgtagtttactccaagactcactgtgtgacctcccagcacattgttgcccctcatctggccctcagcccctcatctgaggatggagagggctggatggcttggcttctaagatgtcttccagctcaaaactcccagattccttctcctgcccctctttcctctaccagatggatttggggtgttaaggttgggggctacagcagaggagtaggaagacccagccagaaagtgactccccagggagtgacttgggaggccagggcagggcaggaggctggggcagccagatctagcagcctcgtgtgtctgtaccatgtcctggccatgggagggactcgggagagggagaagacacactgggaggggcttgggggccaaggggaggaagtgcagaaaggaagaagggcctcttggccaggtcagtccaaggggtgcacagttggccagcccccaatatagtcaggcccattttgtaataaggaaattgaggcacagagaggctaataacctatcggaggtcgcagagcctggaggcagggtcacagcccagggacgataactctcacgatgctgggggctgagtccttctggagcccctaggaaggaggcagcatctgcacatcagaggagcttccaggaggaggcaccagttcctgtcatgtccacttccagagtgatcctcgtgtctgggcctacctgcccccactccccagcgccaccgcccagcctcaggtttcagatctgagttggtcactccttcacttggaacccactcttgtgtggcctccgtgttcaggctgctgggtggggccggccaggctgtctgtggtcatggccctgtcaccttttgcagccagccctggccaccccccatgagttccctctgctcccgttgcaaagggttacttgacatgctccagataaacattttcagccctcagtgcctgggcacacacttcacttgctggccctgcctgaagtggcagtcaggagtcctaagttctcattccagctgcatctgcagctggttaagtagcccttggcacagaccttctgtgggcctcagtttctacacctgcagaatgggtgggaggattgagtgtggtgctctctaggctcccccgcacttccctctgtgatcccaggaaaggagctggggtgatggcctctcgacatggggtcagtctgtgagggcagggctggaagacccctttccaggtgcctccagcgccagatgaggtggagcacgcccgtgcagtcagtcacaagtgggtacccagagctgcacctcatcattaagcactaattaatccatttactgatgagttgctgccaggacttctaggccttctccctaatgccctccctcctgctgcatctgatcttcaaagggatgggaagcatttccaaaaatatctattttcccgtgattctttgggaggactgctcagctcagcaattaaagacaaggaggtcgcatcctccctggcaacggctccctgcttgttgggcctgctttctttcggatcacctcctttctccccatcaaagcctgctccctctgggtgacccagcctctgatgggactcctgactctcccccacatgtcaaggggggcaagggtgttgagcaaaggggctcctcccacaatatccaccggtaccctttgatggggacaagggacacgctctgagtctcacgtaaggttatataaatacagctccaagacaataataataaaaataacagccaacatcacatcccaggtacagttccaagcaccttgtgcatgttaactaaaaatattcaactcttgatgtaggagctgctattcagatgctctcacttacagaggaggaagctgacaggtttcgggatttgcccaaggtcacacagctagtggaaggtagtgccaggatttgatgctaggctgtctgggtccaggggccacgctcttagcactactccatgctgcctcttaactcaagaaccaccccaccccatcccaccacccccgggccccttccagccggatctctgtcccaaagcccctatccctggaggtatttcagagcagcctctggtcccgggacttcccagccatggcagagacactgggttctcctggttcctcgtctcaccctcccctcagacctccatgaaaacccactgggtgagcctcagccctccggtaactcatccctcatttggcaattggagagaatcagcagcctcttcaccaactctgcccaagggcctgaggctccctgagactgcggtccactgacatggaagagctttaaaaatccatttagccggatctcccactggccagctgtagctgagcagctcctcagcagggggaccagggaggggaatggaggggagtagtgcgagagaggagaggccacatctacttttcagccctggaggccaggacgggctccctatcatcaccttcttgtcctgatgctgccagcagaggcagctcccaggctggatggtcccttggggatcagccagtccagcccctccttttataaatgagaaggggtccccagaggtcagtcatgcagcacggcagcagctcagctggtcccagggccccagcctctagatcctcacagggttctgccccatggggctccagactcaaggactgggactccagcagctttcccagccctgttccagccccaagggccactgggagccacaggaaggcctacagtgagggaggctccaggtgagatactcagggcttcatttctctgccaggcagttctgcctgaagtcagagccagaattaactcaaggaagcatgtttagagctactgatgccagagccgggtacagggtggggtggggcaacctctgccagcagagaagatgagatggaatttagaactcatgctgtcccttcccagctaggttttaggaccctggagctcaagcctggtaggcatgaaggagggtaaggggaacacgttgggcagctctgcccatcccagggccctaaagccaggcatcaattcagctcacagggcccctccccatctccttagaaggtgacaggttctgggccacagtccaggccggtggctgcacaaacctccatatgtccctgggccactctcctgccttcctccttgagtgacatgggccaggctaggagcagctgtgacagacctgagtgatgacatctccccacacacgcctgtcacctgtcattttctgtccaagagacctccatcatggatgttccccccacccacagaccacgaccttccaacacaggcccgctatggggaagtgccaccatgggaccttccccaagatctgccccatgaactctgagcccccatgtgcagcacagccagtgaggacctcccacggcagcctctgtgagatggctctaccacaagaagccctgtcatgccacctgccacgcgagctgtcaccgcatacccttccaccgtgtcatgcccagcctcgtgaaaattgactcatgaggtctcaccatttttttgctgtcttgcaagacccctgaaaaggagatttctcagaagagcacctacctgtcatctgccaccacataatgacttgcaaaggaacagcccagggagctggtcaagcctgtccacgggccagtcctgtgggcatgatcatgccagcttgagtgggcagagccgggggagccaccaacccctgctggaggccaatgggcagaaagaggcaggaagatgggggtggtaaggaagcccctctccccagcttcactacacaacccccagccagcaggtgcctgtactggccatctacagatccatctacgcatccatctgggccaggatggtcaggcaggggccggggctgccccgccatcactgcctctctcttccttttccagacaatggctaccgggagtgcctggccaatggcagctgggccgcccgcgtgaattactccgagtgccaggagatcctcaatgaggaggtgaggctgagccgaacaaggctgcccatatggaggggagtccagggtccccagcagagttttgtgcctgctacttggagtcagggagccagaggctaatgtcaaggccctgctctagtgaagctgactggggagctggagctgtcaacttggaaaaggcccatgagcaggcgccctcgagggcaggctggaccaatggggcactgggcaggctctgatggtgatgagatgggtccttgttccttccttccttctccctgtgctcatcgggcagccgcttgcactgggcatgggactgtcctgggggtgcaaagggagaccagactcggtcacaggagtcccacccttttccacaacacatgcctgagagatacatccagttccagccacagggctgtatggaaaccagggacgggatggaggtagcaatgcagtttgaaaaagcccttggaaagccttttaaaatgttaaatgtttttgagcagatattgcttacacagaactcagaaggtacaaatgggaatacaatgtcccctcccaccccgtccccagccactggattccctcccagaggcaaccattttgccaatttcacaagtgtccttccagagacattctccgcatacacgagtaattttgtatacgtattcttttttgtttttacctgaatgttgcatgttatacacactgtctacaccttgcttttttcatataatcatctatcttagagatggttccatatcagtacataaagagcatcttcattctttttgcatttgcataatatcacaaaatgtaccataacttatttaaaccagtctttattctcagtctttagttattacaaatgctgctgcaatgaataatctttgaagggtgatatttggcagaggcacaaatatatctatcctggagctgctactgccctcggtctctcccaccctgtctcctttcccacccgacgctttctcccttggtgctgaggaagacgggggtcaaagggcagaaggggggacaccccaggctgtccgagggccagggattctgattgtggaagagagagactgacctaagcagtcccaagaatcccgtcgcctaaagatcagagctggaagggaccgtggagactctccttcccatcttgaggttcccagacttgcctggttataagaatcgtccagaggcagatctcctgaggtcaggagttcaagaccagcctgtccaacatggtgaaaccccatctctactaaaaatacaaaattagccgggtgtggcgggattacacctgtaatcccagctacacgggaggctgaggcaggagaatcgcttgaaaccaggaggcggaggttgcagtgagccgagattgtgccattgcactccagcctgggcaaaaagagcgaaattccattaaaaaaaaaagtggggccaagtgcggtggctcacgcctgtaatcccagcactttgggaggacgaggcaggcagatcacgaggtcaggagatcgagaccatcctggccaacatggtgaaacctcatctctgctaaaaatacaaaaattagccgagcatggtggcgcatccctgtaatcgcagctactcaggaggctgaggcaggagaatcacttgaaccagggaggcggaggttgcagtgagcccagatcgcgccacagcactccagcctggcgacagagcaagactctgtctcaaaaaaaaaaaaaaaaatggaatctcccagagcacttgtccaaatacaggtcccagggccacacccaacacctaagaaatcacactgtccaaggaggacctgggaatctgtgtctttcatgagtgccccaggggagccttctgatggggcaaaagtgagaaactctaatctagtgcgacccgttcacactacagatggggagactggggcccagaaaaggggaatgattcacacaaggtcacgtggctctgggacattccctttttttttttttttttttttttgagacagagtcttcctctgtcgccaggctggagtgctgtggcgcgatgtcggctcattgcaacctccacctccctggttcaagtgattctcctgcctcagcctcctgagtagctgcgattacaggaatgcaccaccatgctgggctaatttttgtatttttggcagttaagtcagagcccggaacccagggctttggagcccaggctccggagcacaggctctgcagcccaggctctgctttgcccactgccaggtatctggcgtgaaacaaagttaacggagaaagaatcactttccttcacctgtagctcccaccccggcctggcaagctttggttagccccacccctggcttcctggcctcaagtcactgagctaatgcggggctctgctgtctccttccggaagctgcagctaggtcaatgcctagcttaaaagactcacgagttcttccacggtgctgctctggcagggcgaggggctgcctggcatctcagatcccacaggccagacctttgggtggcactcaaggctggggtgggttggtcaggctccctgatgatctgatctgagcagggaaagccctcagcttgctaagcccccacacagagagcccacctgggaagtcctgggattgggaggagggctcctcctggactgggggaaggaggtggggttccaggttaggagacttagttgggccagaggagatggccttggccttggctggtggggtgggagtgggcaagaccgttcagggatgtgaggagcccgtagcctggcacacagtagaggaggtgggaggaaaggaaacagggctggtgctcagaggagcgggtcagtgctgtcagtgactcaggaccacacgccattgcagagagggatggtgtccaggaggcacagctaagccatgaggtcaggctgcaggccgcactgtctgtcccagcttcacgccctgcactcaaccctcctgagggtcagcgcggggtcttcgtggttcacctgtctctcctgctctattgcaagccccttcttttcagttggctgatggggacactcggcagcccccattttccccagcacccttcaaaggcctaagggcagtaggttagccaccctcagcctgccctgcaacacccaaccctgccaggacaggggtctctacctctgtccaccagcagggttaggacaaggaagaggatcgggagcccggtctcatcagccccctctttgcattgcagtgggaatagcacggaccttagggtttgggtttcaacgggaacctgctgcatgaccttgaggaggcaacttaacctcaccaagttcccaaaaatggtggccaggaattcagatctctgccttctggggatggaagggtggtgttggcctgtcttggcctatgggagacgttccattcacctgccgccccctgtctctcatctcccctgtgaggtcaggggaggttgtagtgtacacctgggggagtgacccgccccaccccccagcccatccgtgcctggctctgccatctctttcctctgcagcccctgctggcctggtgcctagcactctgggtaatcgattagtttaattagtgaaaatgccattcccttctgccagcccccagcctcgccagacccctcccagaactgcagaggaaagtatccaattaattgagtggtaggtttctcagctctgggcctgggctaagccctaattaagctccagcgccctggggtatcgcagataatggattcgcagaagtctgcctgtgaaatgggacttgcaagggcacctcaaggccaggcaccccaggagatctgcccgcagccagcaccaccaggggacaggcccccaactgttgcatgcatggctggccgggggatggcactgagcccccagcaccacccctacacctgctgcctgtatcagcaccctctcctccccccaccacctcccgctactactgttcactcccttccccaccgtccagccttcccccacccacccaacacttgcacacactctatcccctttccccacgttctgctgcgcacaggagcctgggcctcaggcacagcctgggagagcacaccgtggtgggacatgaaacggattctgggggtctggtttgtggaccaaggttcactgctcaccgtgtggggagaggtgagtggtggttggaccagggcttctgaactgcagaggtgctttttcctaaaaccaagctccgattccatgggcctggcgtagggcatacattccactttcctcaagatctctgcgtgctcctctgcgtgctgttgctgggccaggggccaccctttgaggatcgaggggctggagtgagtgcccactgcagggtaagaggagtagctctggaagcctcggtggagaggacgtgccagaatggagtgggcaccagtggggagcttggaagggaggtctcattgccaccaacccagagaggcatcaggacggatctggcactgcagcgcctgggacgaggtggtgtcctgcagagagtccagtcagagtcagccgggcacaaattgcttattcaattcagatcactgagggtacagcggagtggcctctgccaagtaccacgctgtgccaccctccttagggcggggtgcctgctggtcttaggtctccagactggatggagatggagtgctggtcagggcccgaggggtagctgtgcccatttgtccttcggacatcccagctgctttgctgttatcgtggccatcggtcggggtgtcactggctgtccctgggggtgctgctgactctcctctccaggtatcactggccacctctcagggtgttcctgggtgcctcttaaggccttgctgtctctctaaataatgctggccagaactctggttgttattggaaatgtcacagtgtcactggcttctgtctgggtgtcgcaggatgtatttgtctcagggtatcagcagccatccctcaggctgtctctccagctgtcttctcaggttgcatgatgctgatgtggccgatgagagacagggcttgaacccggcccaggcccgactgctcagggaggcacactgagactttgtcccccgggaatggtttggcctgattctccctcaggctcttggaggaaagccctcttgggcgctattgtcccagcaggaggtcccccgaggctcctgggcccaaagtggcgtgagaccaccccagagagtgcctctgctttcaattcctgcttgtcccccaagaaatgtcgcagggggccggacacggtggctcacgcctgtaatcccagcactttgggaggccgagacaggtggattgcctgagctcaggagttcgagaccagcctgggcaacatggcaaaaccccatctctaccaaaaaatacaaaatattagctgggcatggtggtgcatgcctgtgatcccagctactcgggaggctgaggcaggagaatcacttgaacccaggaagcagaggctgcagtgagctgagatcctgccactgcaccactccagactgggcgacagagtgagactccatccctcccccacccaaaaaaagaaatgtccctgggaaacagggaaaagagggagcttaaagccaggcagacccaggttccagataccggctgcgtggcgtggccaattattcagtctcttctacggaaagaactgggatgagaggagcagtctccaagggcagctgtgggaaagaaaagcagtagtgtctgcagagctcctggcacagtgctcagcatacagcaggtgcttaacagataactcctccccactccaaccccaagggcccggtacggcctgactcgggagtgaggcaggggccctggaaggcagcactgaagggtctccctgcacactgcgctcctcccgcccagcctgggcctgtgaacaaggccggggtgttgtgccatgctcggctccacacatgttgtcattacccaggggcttctcagcatggatttgtggaaaatttaataaaaggatattaaataccagctccagacagcctgtgatgtgtgcatatcttccagagcctccggattggggcatctgccgccaggcgctcagagaccctccccacttgcacgggtgataggtaccctctcctcactcccctctctgtctctgtctctcctgccttcatttacacctccctggatcccagtcctttggaggctggagttgctaatgtaattacctgccatgttccagaaagcctctgcctggaaaccagctccaagaacagagcttctgtagcagcctctggagaggttccccaatgagggtgctccttcagaagggccttggtggccgggcggaactgggcatagggtcttggcttctcctgggatgcctggtggatagggctggacttgatctctggtttcaagtgggttctgtaattccaacaggaaggcctatggagtagctccttggtggccagtagctccttggtggctctgagaagatgatgagggccgttgtgagctcagtgcttctcagcacttgcatgtcacccacctttgtgcctcatgatcattcagccccaccctagagcctagaaacggggaggaagggaggtgctgccagggacccctcccttctcaaagtcacctgcttttcaacacccgtctttccttccttcactcacacactgctttggagtttgactgcgtgtcaagctcttggtttctaggccctgcttcttgggacctataaaagtgtggatgggggctgtgctcttgggcaggagtctgcagagagctgggcatggggactgaccagtcccctattatgggctggggacctgtttgcagccttcgtatcttgccaatctacatgtgcaggcaagaggtggttttggagttgcgcgacctccagcgcgtcagcataacctctgtgctgttttcctacaaaataaagcccagatgcctttccggctccccccacggggttgccctgatggtttaagacgataacagatatgaaaatcctctgtaaacaggaaggcttcaccactcttggaactcaagattgctgtaaagaggagggcagtgacctccatcagtatattaaattcattaagaaataaacccggggaatgtgttacagtcctgggagaggatcctgctcactctgcacagatccccttgggccagggatggggaaggccccggaaagtgagttatggagcctaaggagacttttctgtggtttctgctgattctgtggatgccagagcccagcagctgcccggcccctccttgctcacaggagcaggcggcattgcagcaggagggatttaggggtggctgagaaggtggtgactcagttcagaaatgggtggagaagagaaatcccgggagtttggtgtctctgcagctgagaggtccacctggtgttctgactgggtggcagcatgggtagatgcgagtgtgagggcgcacctgtgagccggccacatgtgcttgtgcatgcaggggcggggggtccatgtggagtggggaatcccacgtgatgtggagattcagttcgacacaacacggagcagtgaacacagcatgggattcagggacaagcagagcctcaaactggacggcgttgctctgcagcgaggcctgaccctcagcagatgctcaggaagggggagtggcccttgagatcatgacccgctccatcccagccacccctaggcgatgtcctcacagagcagctcccatccagcagaaggctcacctctgcccctctctcctgctccagaaaaaaagcaaggtgcactaccatgtcgcagtcatcatcaactacctgggccactgtatctccctggtggccctcctggtggcctttgtcctctttctgcggctcaggtgagaagaccccagcactgcctcctcctgtccccaggacctagagcagaagcagggtggagaagtgagaggagcagctctaggttggggtgggggttgctgggagagggtggcaggggctggcttatctgagagtctcaggtctctgggaacctctggcagagccgctctgccctctccccagtagctgctggaatggtggggagggacaaaacttgtcttatgtcacccatacccaggccaggctgcacccattggggtgaccaggcagatggagccctggaggtgggggctccatggagtggtgccccatttcaggttcgaaggtacctgggccccagcactaccgccaaggatgcaggtggcagagccggggatggggatggttgggatcaggagccgagcatcagggctggaggctgggagcagggctgacccctgtgactgtccatcctggaatggcagggagtagaaggcacccccaggggaagcgggcatcgccaggaatccagctgccctggtccatggagcacaggctccatggagtgccaggctctgcctggggcttatgtctgggtgggctgcaggcaggaagggctccatggggcattaggagagcctggctgtcacctccctgtgtgacttggccagtcagccccaccctgtgcctcagtttcctcatctacacatctgggctggggtgatggaggtggcctacccctcatcctctctctcctatcgctcccatcatccacccgccctgctgcaccaggagcatccggtgcctgcgaaacatcatccactggaacctcatctccgccttcatcctgcgcaacgccacctggttcgtggtccagctaaccatgagccccgaggtccaccagagcaacgtggtacgtcctggcaggggagcggggagcaggtcaggccaaacccaggtcagaggaggggcccgcctgccctgcagaggaggagcccacagaacaggagtgggatcccagggtatgccctgtcctgccctggggaggcccaggcccagggtttggtgcctcccctgccccccatcatcatctctggttgggggtggggtggcagggctggtgcaggttggtgacagccgcctacaactacttccatgtgaccaacttcttctggatgttcggcgagggctgctacctgcacacagccatcgtgctcacctactccactgaccggctgcgcaaatggatgttcatctgcattggctggggtgagctgggcagccacctccgcagcctgggcagtggcggccgccgggctgccctctcctccagactcaggccagcgggctggggggcctgagggatggaggtcgggttggggcggtaaggtgtgcacgatagccctctgctcctcttgggggtgggcggcagtagaagcaccttgaaggaggtgtgtgagtttgagatccaccctgagtaaccccagaccccctggagcctgggctgcactggggttctccaggcccacatcctccagcccccgctgagggctctgtgacagcccatctctcccccaggtgtgcccttccccatcattgtggcctgggccattgggaagctgtactacgacaatgagaagtaagtcatctcctttcccttcctgaccccaaggtttaggctcccagcccagcttggtgacactccccacgggcattggccatgctggctttttcccctcaggaccatggtttctgcatctataaagggagagatctgggggctggactcattcagagggtccctgcctgtgctctgcctgggtggggctggacaagcaggacccagcctcctttatctgccttgagcttacacaggaagcagcctggagccagactgcccaggttcaaatagctgtgtgaccttggacagattactgcagtgtgcctcagtttcctcatctgtaaaatggacatgctactgcctcaaagggctgttgtggggtgatatgagtccatctatattaagcatttacaatagctcctggcacatagagtaaatgctatataaatgtgttctattaatattaagacatcttaataaaagagtccatgaatttaatagaagtggacctagatgatctcagaggcttcttccagctctgaagttctttggttccttatgaaatggactcagatgtttccaatcgtgcctggaaacttgatttctgctgcagtggagctcaactttggctcacattagaatcacctggaatgcttggaaaagtaccaatgcccaggcttcaccctcagagaatcaggcgcaattggtctggggtgtggcctggcacccagaagtcttgaaaactgcccaggtgattctaatgtgcagctcagattgagaaccactgagagagagcggggcagaaaaggtggacatggatggcaggggagccccaggaccttctttgccaaacaagtgttcccgggaacctatctgactgacggacctggcgtccaagtggcctccaccacagtgacaagccctctcctcccccatggaggggagggggcctgcacggcttcattgggctgaaagaggagcctggaagattatcttgcgtgtttatgtggttgactccctcctgactccctcctgactcaggctggctgaggccttgggaagccgaggcaggcggatcacttgaggtcaggagtttgagaccagcctggctaacatggtgaaaccccgtatctactaaaaaaaaaacaaaaaaacaaaaattagctgggtgtggtggtgcgcacctgtagtccagctactcgggaaggctgaggcaggagaatctcttgaacccaggaggcagaggttgcagtgagccaagatcgtgccactgcactccagcctgggcaacagagtgagactccatgagtctcaaaaaacaaagcaaaacaaaaactgtttgggctaaaggagaaagtgagtctgagcggctctgaagctccacctggtggtgagaattcaacactgcaacagagaggatctgggtgtgagaaaccagaaacgaacttgcagaccagaggcccgaggactggacccggccctcagaagctgtgtgtggccagcatggtgttttctgaaaactcgattttgtagccaacctttaaaaaatccaaaggtttcatttacaaatctcaatttctggcttatgagatctagccactgggggtcttcatacccacgaggacataagggcttccagtttgtctggtccccacccactccccaggcctccctggagcttgctggagggacactcgggaaaatgcaaagcaattacctcctgcagcaggtagaacctgtgcaagtattcctctcaaggttgttcaggctgtgactggacagattcaggctgagattgcgaactgctgggtgcccactgggtgacaggtgtggtgccactcccaccagcagccccccagagggcatgctgggcctcagccactgccaggggactgtgaggaggagccgaggatgcagcctcgtgttgggcccatgcccgttcccagccactcagtctttcccactgtctacctcctgccccggtgcttgcttccaactttgcatctcatcacagaggatgctgtccgttctgcagatgggacaattgaggcatggcagtgggatcaagtgacttgaccttctgccagggttggaattgggacatctacctcttggcctccagccccagtcctgtcctggccaagcactgtccctccccatgccatcgaggtggacgcagatgacccttcctcccctttcctctgtggccttctaggtgctggtttggcaaaaggcctggggtgtacaccgactacatctaccagggccccatgatcctggtcctgctggtaagaacctgggtaggggcaggagacagggcccagtggggaggggcaatcagtgccaaccgtggacagaaaggactcctctacctagaggtgggggccacccaaagagggggcatgggtcagagatgtgcaggtgctcatgaggaggagggagaacagcaggggcactgaggccagagctgagaagcctgggtcccaagcctcttgcacactccggcccgctggtgtgctcaaattgcagatcaatttcatcttccttttcaacatcgtccgcatcctcatgaccaagctccgggcatccaccacgtctgagaccattcagtacaggtaaccgggtaccaccttcctcaggcctccccctgatgaaacccctgctccccatgcctctcacgtgccagagacctgccactccctcccccgacctggccctctttgccgagccagcgggcagcccgtcctggggtgggctgtgactccgagcctccccacccgccccaccccaggaaggctgtgaaagccactctggtgctgctgcccctcctgggcatcacctacatgctgttcttcgtcaatcccggggaggatgaggtctcccgggtcgtcttcatctacttcaactccttcctggaatccttccaggtacagccctggagggacacatcagcacctccttgggtggggattctgccaagcagaggcctggagggcaggaggccagggagaagcaaggggcagcccagaggctgggtgggcaacacctgcagccgacctttgacgcctcctctctcctccccagggcttctttgtgtctgtgttctactgtttcctcaatagtgaggtgaggacccgggggccctgcagcggggttcagggctgtgaggcctgttgggactggcgattgtctagagccttctcctcccctcccagggctgcctctctccctccctgctcctaggtccctaggggtatgctgctgggagccccagggtggcccctcccacctgtccactcccacagtgacagccccctcctttgctctcagaggccgctggcaccaggctggaagccagagctccagtatctttgatgagcctgtgaaaaccaggaagggctgagccctgggcaggggatacatgtgggttgagggcagggagccttcatggcaaagggcatatggtgccttcgtgtgggttagaaaagggtgccccttccccaggacatttgagaaacctgttccgacaaatatgcaaagcagtcgtgttaaggctgtgagtgtcatcccctactgaggacttccatgtactcagctgacctgcacagccgcttacctgcacagctgctcgtggcggcccaggggagggagggggtcctgagccacaggctcagatgtcgtgctcctccctgtgcccacaggtccgttctgccatccggaagaggtggcaccggtggcaggacaagcactcgatccgtgcccgagtggcccgtgccatgtccatccccacctccccaacccgtgtcagctttcacagcatcaagcagtccacagcagtctgagctggcaggtcatggagcagcccccaaagagctgtggctggggggatgacggccaggctccctgaccaccctgcctgtggaggtgacctgttaggtctcatgcccactcccccaggagcagctggcactgacagcctgggggggccgctctccccctgcagccgtgcaggactctagctcatgagtggaaagtcacctacaggactgggccgggcccagggcctctggcttccctgcccaatcctccctggagaagggacatgggaatgaattgaaatggggcgctggacacctacagcagcacgcatgtccctccaaggctgtcttctcccagagcacaagaaggccagcccactgggccctggggctgccctcggcaaccgtggggaggccatttgctgccctggggcatcatgggcaactcgtgacagcctctgactcaccacgatgacgcctctggacctcggtgatgccttccgacaccactgggaaccaagggccctcactcaggaaccctggagacagaagtcaggtgtcatcatcagacttgcggccacagcactagagtcacccccccaggcctccagaaccttactggcactgtggcactgccaccagcaatgccctgccttgctgccttcaccctgaacatttagtaccctgcaggccaggccagcttcccctcacttaaccaccccataccagtcacctcctgctccttttcctcttttgtgagaagatgggggctggagggggcagagtggcctgtgagcaagagccaggggtgtcccagtcccagcctctggggcagagcttgtagccctggatggcctctggggcaggaccactagctaagcaagccaggagaagacccctgcccaagtggctcttgggacaacgtgctgcttacactccaggtgtggaccggccgcagcccccactgacctgcccatgtccagagggactggacagccagggcagggctttggggggcactagaagatgagggtgtcggctgtgaggcgggtggctggtataaataatatttatcttttcaaccagcatttgtgaaggcctggactccacagggggctggatggagagggtgtctcacagaggtgggggctgcttcccagctttcaggggctgctgtgttgctgagaaacctgaccccactctcaccccggcaaggatggtgccaggagagcccctgagggccgggagaggggtgagggcaggagggagggcttcgaggaacaggtgggtctggccagggcccccttagttagggacagcttgttgtgaggaggtgaattagagggagaggagggccacggttagggatgcagaggagggacaccatgggtcaggggaaggaacaaaggagacgggagtgtgtcccagccccaggcaggagctgtgctgattggtgggaagcagaattaggatgctgggccactggacaggctgtgaatgcagctgtctccactagggccgccacaagaagccatccctgagaccctgaggtttcttgtgcaaactcgagggaaggggagtacagagagggcaacagggagtgaagccaggcaaggaaggcaggggaaaggtgggggctagagggggacacggtagcctgtgagcaagagacaggtatgccccagccctggccagtgccgctctgaggtgggtggcacactcaggctcccctggcttgctggcttcagtgcccccaactccgggccagagcttgtatagccctgggtggcctctggggcaggactgacactccaacactgttgtgggcgcctggagctcccttccgctggggaagccctccctcatcccacccaacaggtgagggagctggggtatttatccaccatctcccatcagctgcgggttgagggctgctcccagggggacatgaactcttctgcattcccacatcaggctacagagggccagagagagttctccggcacagtgatgtgcgggtgggtggaagccagtgtgtgctgcattggaggggcagggggtgtgggtggaacaccagaactggacacagggccccactgcagcccgggccttgtctctgggtctctctaaccagggaggagagccccgtgggtgggacgtgtgtatacacatgtgcacttgtgcacccaggcgcacacaagagcttgcagtgtcaggacaccaggaacagacaaaggtgacacagtgccgaaagccccgcagctcctgctgagggagggcacgtttcgttggggagggcctgggcccgggtgtagctaaggatatccttgaaggccctatggggtactctgctctgccaattctccaagctctgtgccctgaagtagagagatggggtgggggacccagggagcaccgtgacagaggtaggctggaggcttccagagcaacgtgggggatattgtggggagtgggaagaagcccagtaaagggtcctggctgcctggagagactagaagtgacctgagtctctaatggccacaacggagacagctttcccaactctgcctctcacccagtgaaggtggagaagtgagaaggcgaggctttcccgagacaatgccagtggggatgggatgagggtcgcaccgcaggggtggaggagccgagagggtgggggtgaggggaagacagggaagggacggtacagaccaggaagtgtggataagcccagccaggccgcaccccgctttcctgagtgggcttcctggctgctctcactgccaggcaccttctgggcacctactgtgtgctcagcactgtgctaggtcttgggtgagagatgagcagccacccaggggggaccccagggaccccccaaaaaacacaaagctcagagcctctggctctggaaggccaccaagaggacagctccaagacaagtctgagggtcatcggagaagctggaggcggaatccctgggcaggcagatggagcctggggctcccctcccattgagagaatctgagggcggaggggctgcttcagggaacagccaggaacatctgagcctcagaacctgcagcccagaggcccagagttctatcatctcccatggcagacatgcgctctgggcttcgtcgcagagaaggcagccctgagaccaggcatctgggccattctgctcaggttcagcttggggtggcgaggcccctgtgggagtgagtggggtgtgatgagccgaaaaacacacatgcgactacacaaagttgggggagccactggggaccctccaagctgcagtggtgggggaaggtcgctggaggccctcccagacccggaagacctcatgcctggaagaatttctctccacaccatgcctaaaggctgcggtcccctaatgctacccccacctgagcccatttctccttgacgtcctccttcatgggcacagaacagtagtggaggaaaagccccactgtttttccagttcaggccaccccctccccgtcccttagtgtgacagcacagcccctgcccagaggtcctcagcctcccctccaggcctccttctctagccccctgctactgatggctcagctctcctgggaccaggactgggtggagagtcagatggggaaaaccatgtgttagcagatgaggtgggtttggaatccatagaataataccttcattgtgggtattgtagattactttgccatccacaaacatccttataacatttgtcttttttttttttttttttttttttactacgtgggtaaatctctgttcggggctctcagctctgaaggctgtgagacccctgatttcccacttcacatctctatatttgtgtgtgtgtgtctttatttgtttatttttattatactttaagttctagggtaatcctcaactagcccacagaggtagtaacccacctgttttgcagccagggaaactgaggcctggcagctcccctaagattgaaggtctggttccaagtctaaggcttttttcacccctcagtgaactgaaggggcttgggttctgggaggccagaaccaatgaagagctctgtggcaagagggcagcaaggaggcctcagggtctccgtgatctgggacgtgccccacgtgaagatgggacttccccaaagatggccccaccagtgtccagccgccgagcaatgagagttctgtggatccagcatctccttccccagcttcctgacatcctccaccccccagctccttaaaatgatgcttaatttcaaacaatgcagccggggccaccatcagccacagtgggcccccctacaccccagccaaggagtgtgctgctggcctccagcccaggggtacctcagagccagctcatccaaactgccaactgacttccaactcagctgcccacacttgcttcaaaccgaggagaatgctttctacaatttgctaacagcaacactgatcattattgattgtttaccgggcatcaggtgctgcttagcccctcacatgtttatctcattgactctttatactgccctatgaggcggggctgttatccccatttaacagataaggcaaataaaacccagagaggttaagatacctgcctgatggcacccacggatggatgaaaagccagggaggccacactaggcatccgtgaagcttaacccctatgcagtgggagttcttagtaaggctgtcctcccagccccactgccccttccaatcccctccccagggaaatccttccatccccagtctgtggtcaaacagcattcagagatgagctagctgaaggaattggagcctgcggagcgtgggcctcgggcagcccactccccaaatctggcctccaagccagctccacctgccagtctcccgtccccagccccatcccagctctacctcagagcatcacctcccacccctgccctcagctcaccaacacctgcaggtcctgctggcagaccaggctcaagagaggcctgggccatatatatttatcaaagctctcagtggcttgggaacaccaatgagactattatttggagataaggccagagaccacccttggctgccagatagcagccctaccggcttctgtccctccaaggggtccttgactgatccctgctgcccagcctcattgcccattgggccaaggcaggtggagcagaagaaggggtggtggcctcttaggtgcctaaggagcccaggttgggggcacggcaggcatcagctagggtgagggggcatgggggcagcagctggtgggcctgcctggctcatcctcatcacaggggaagggggagggagtggatggcaatccactctagaacatgcagcggggaagctgctgggcagggcagcaagggcaggtgaggggccaggtgaactaggccccttccccacccttcctgagacctgctgcctggggcctgctggccctgctgccctgtgtgttgaagataaatgttccaggtgcacctaggtcctcaagtagaaggcagagacactaccccagcctgctctgggcagccaccccgagagcccaggccatagctgagggggcagtagggtggggggagggagggggagttgtggggagcaaagtcacagatacagggggtgccctccaggaaaggagttgaatctggagtgggggtggggagggtggcgggactgaagtcttggagcgggatttcagcctggcagtgggccatggccccaaggggcatcagccactcatgtgagggcactgaccagtgctctgagtggccaccagaggaatgattccagggctgatggatgggggtgggcacagggatgggggacctggggaagcaatgatcaaacatacccacgaaagccttctgtgagtggggtcccaggcagagtctcggagggaatgagccttctgcgaattatctgggccctgggcaaccagtccacgggtagatctgggagaaggggcaggagcaagctctgcttgaggtgtctgtgcagacccccaaattggggcatgtgctggtgtgatggagtccagaagaactaaaatgagacctgtcctgaggagagagcagctggaggggactggagttgctccatttcgtctgggcgctgtggctcacacctgtaatcccagcactttgggaggccaaggtgggtgaatcacttgaggccaggagttcgagaccagcctggccaacatggtgaaaccctgtctctcctaaaaatacgaaaattagctgggcatggtggtggtgcatgcctgtaatcccagctactcgggaggctaaggcaggagaatcacttgaacccgggaggtggaggttgcagtgagctgagattgtaccactgcactccagcctgagggacaagagcgaaattccatctcaaaaaaaagtcccatttcaaccatgttagtgcacaattcagtgactttaaatacacaatgtcgtgcaactgaaaccactgagatagaaaaagttctggaacttcttcatcaccccagatggaaatcccatacccaccagtcactcctcattctcccctcccccagcccctgcccgccacgaatctgctctctgcctctgtagatctgcctgttttggctgtttcacgtaagtggaattaatcgtacaatatgtgtccttttgtgtctggcgtcttcatttagcataatgtgtttccacttagcataatgtgtttcggcttagcataatgttttcaaggtccatccacatggtagcaggtatcaaaacgtcattccttcttatggctgaatgctattcccttgtgtggagagaccgcagtttctccattcatcagtggatggacatatgggttctctccacctattccaagttatcatgaatagtcctgctatgagcatgcatgtacacgcttttgtttgaaggcctgatttcaattctttgggatatatagctgggagtataagtgctgggtcatatgataactctgcttaacttatctaggaaccaccaagctgtttcctgcagcggctgcacaattttccattcccaccagcagtgtatgagggtcccaacttccctatatcctcgacaaagcttgtgattgtctgggttttgtgacaaagtgggtgtgctggttcttgttttttaaaagatccacgactccctgcgtggagaacagggcctggagtgagggtctaggttgcccattcgttgctggggggccagaaagggttttactgtcacagccctcctgtggcctacaggcgagcctccctctcctaaccaccctcctgccaacctcccctttgaaatgggagcactcggaagggacagctggcagcctcctcccctgggctctgcctgcttctcctcacaccggctggtggtttgtttgccagtcacttgtatttgttcctgaacatgtttctgacagttcacttgtcattgtaattactgtcgtaatctaactaaatgttatattactgatgaatcagaagtgcactaacaaggagagatgtttcttatgaaaattcagtctaatgctttgaaggatactttacaaatgagtcaccaaaaatattggcaaattaggtgtgggtgagatgagtgtaaataactgggtgagagagaattgtcagaatctcagatgggttccacttgctgaccacttcacatggccctttaaactcaccctccacttcaaagaatccacagctgatgttggagatgatgtttcatccctgtggatttcccaaggaaagcagtttgggactgcaagagatggacccgtaatagaaggagaggccttgacaggcacggtggctcacgcctgtaatcccagcactttgggggaccaaggtggctggatcacctgaggccaggagtttgagaccagcctggctaacatggtgaaaccccatgtctactaaaaatacaaaaattagccaggtatggtggtgggcgcctataatctcagctacttgggaggctgaggcaggagaatcgcttgaacttgggaggtggaggttgcagtgagccaagattgtgccactgcactccagcctgcctaggggacagagtgagactccatctcaaagagaaaagaaggagagtccttgagaaagatcagtgattggccaggcacagtggcttgtgcctgtaatctcagcacctcgggaggctgaggtgggcgattcacttaaggccaggagttcgagaccagcctgggcaaaatggtgagacaccatctgtactaaaatcacaaaaattagctgggcatggtggcacacacctgtaatcccagctactcgggaggctgggtcgggggagaattgcttgaaaccaggaggtggagtttgcagtgagctgagatcgtgccactgcactccagccgagcaacagagcaagaccctgtctcaaaaaaaaaaaaaaaaaaaaatcagcatgcttactccttagaggttaaaattacatgtgtgttgtggggctgcccacaattgtgcccccaaataggcatgttgaagtcctaaaccccagtacctgttaatgcgaccttatttggaagtagggtgtttgcagacataatcaagttaagatggtgtcattagggtgggccctaatccattataactatgtctttataaagaagagaagagacacagagacacacagggagaatgccatgtgacaacctatgcagagactggagtgacaggccaggccagtggggagaacatgaggacaatggaacctggactgccaagctccagcccccaaatccctcccttctggttccggaggccccagggttactctcccgcacactaactgctttgaaaacctcattcctcaaatctactccatcatgggtggcctgaagaagcctggacaggaggtcctgggtgacctgtgagggcatacaccacagagctgggtgcaaacctgcagagccaaaacctggggctcctggcttcaaatccacctctcaccagtatttgagttctctttccagcggaaagtctgcccggcctcagagttgcagccaggagagtggctcagaatccagcatgaaaacatttggaagacatcaaggtccatttaaccagcacaagagccccagccttctttgctgtgtcaatgtgggcttctccaagcctcagttttacttatccatgaagtgggtgtattaaggtaacgttaagtggctataacaaagagactcatgacaaatcaatgccttaaggaagatcatgtctctctcttgtaacagtccatagtgcacatcctgggctactgttccacatggaatccagggacctggttcccttcactttcttcctctccattccttaggacattgtcctcctcgtcatagacagacacatcacaggcccgtccttgttctgactcctgagaaagggaaagagagggtaaaccaggagccccacggtctgtcagcctaagcccctgatgtaaagagttcacatcatttttgcttaatttctcctggtcacctgtccgttcccaactgtaaatggagttggaggtgaattctggtcatgtgcctggtagaaatggggaccaactttgagggacagcctcaggctgtgcagatataatgacacctccttgcaactgtgcaataggtacagctagggtacctggcgcctagtaagccctcggtaaaagtgctcaatgttactgagctcagagctccaagggaccttagaaactctctggcccaacgtcctcatttctttacagctaaagaaacaggcctagagaggagtgacattggcctgtgttccccatgggtaaggagaaaagttggttcagaatcctatctggcctgcaaaccccatgctcacaccttttatttcaaagtacctggtctaaacccactagggtctgggcagagagcagggtccatatgacctctcccctggtctcccagggttggggggcatcattctagagggaccctgtgccccacagcagcgccctcggctggggaccacacagctttatgactaggtaggtgtggccctggtttccaggacaggtggccagactgctctgtgacaaagggccacgcctgcccctgggaggggtattgggctgccgcccgcagatgttgcagtaggaactgaagaagatggcgtgcctgggcttcctcctccccgtgggcttcctcctcctcatcagcaccgtggccgggggaaagtacggcgtggcccacgtggtgtcggagaattggagcaaggactactgtatcctgttcagctccgactacatcaccctcccccgggacctgcaccacgccccactcctgcccctgtatgatggcaccaaggcaccctggtgcccgggtgaggattccccccaccaggcccagctccgctcccccagccagcggcccctccgccagaccactgccatggtcatgaggggtaactgcagcttccacacgaaaggctggctggctcagggccaaggtgcccacgggctgctcatcgtgagccgggtcagtgaccaacagtgctcagacaccaccctggcaccccaggatccccgccagcccctggcagacctcaccatccctgtggctatgctccactatgctgacatgctggacatcctcagccacactcgtggggaggccgtcgtccgcgtggccatgtacgcacccccagagcccatcatcgactacaacatgctggtcatcttcatcctggctgtgggcacagtggctgcaggcggctactgggccggcctgaccgaagccaaccggctacagcggcgccgtgcccgaagaggaggggggtctggtggtcaccatcagctgcaggaagctgcagcagctgagggagcccagaaggaagataatgaggacatcccagtggacttcacgccggccatgacaggcgtggtggtcaccctgtcctgctcgctcatgctgctgctctacttcttctatgaccactttgtctatgtcaccattgggatctttggcctgggtgctggcattggcctctacagctgcctgtcacccctggtgtgccgcctgtccctgcggcaataccagaggcctccgcacagcctctgggcctctctgccgctgcctctgctgctgctggcgagcctgtgcgcaaccgtgatcatcttctgggtggcctaccgcaatgaggaccgctgggcgtggctcctgcaggacacactgggcatttcctactgcctgttcgtcctgcaccgtgtgcggctgcccactctcaagaactgctcctccttcctgctggccctgctggcctttgatgtcttctttgtcttcgtcacccccttcttcaccaaaaccggtgagagcatcatggcgcaggttgccttgggccctgcagagtcttcaagccatgagaggctgcccatggtactcaaagtgccccggctaagagtctccgccttgaccctgtgcagccagcccttctccatccttggcttcggtgacattgtggtccccggcttcctggttgcttactgttgccgctttgatgtgcaagtctgctcccgtcagatctacttcgtggcctgcaccgtggcctatgctgtgggcctgctggtcacattcatggccatggtcctcatgcagatgggccaacctgccttgctctacctagtgtccagcaccctgctcaccagcctggctgtggctgcctgccgccaagagctcagcctcttctggactggccagggcagagctaagatgtgtgggctcggctgtgccccttcagctggctctaggcagaagcaggagggcgcagcagatgcccacacagccagcacacttgagagaggcaccagccgaggagcaggggacttagacagcaaccctggagaagacaccactgagattgtcaccatatctgagaatgaagccaccaatccagaggaccgcagtgatagctccgagggctggagtgacgcccacttggatcctaatgagctgcccttcatcccccctggggcctcggaggagctgatgccactgatgccaatggccatgctgatcccactcatgcccctgatgcccccgccctcagagctgggccatgtccatgcccaggcccaggcccacgagactggcctgccctgggcgggactccacaagaggaagggtttgaaagtaagaaagagcatgtcgacccaggctcccttgtgaactggaggcactgggacacacgcctctcaaagggctggtggaacattgcagagcaaagccatgcatggcaacaagaaatcagggtatcaaagagatttcatatctacccaaggagtctctctgtttgtcgggagtgcaagagagcagcaaccacataataagagtgtgcagggctcgaagggtccttaggagtgggcaccacccccaaataatgaaggggggaaactgaggctccaagagggcctatgacttgcacaagttcaagcggcaaggtcgggatttgcatccagggctcactgggcagctactcccctctgcctgcttgcccaaccccttcccaatccagagtggcagcttcttagcctggcacacagcccccatcccatccctgccacccaccctaggctcattgcccatcttctctccatgctcaggtcaaacagaactccttgtcctccccacccgctctctctgcatatgctgttccctccagctgggatgcccttccctctccagacagaaacactccagcctggctccctgactcactagaagattccgaagcatcctttactcctcagctcacatccattctgcaaaacgtctctgttcaagaatcccaggcagcagcaccaagcccagcaagttcctgtatgcaccacccattccatcttcaggcattgagtatgcccctactatgtgcatcgccatgtggtgggcacagggaaggcctctgtctagctgggggagggggaggggtgggcagacaagaaacaaacttagaattgtctcaaagaggtcgggaggggttggagaggttgggcccagggtggaagaattccggagaccaaggcctccctcactgactctaagtaatgttcaagcctcgttgggtctctgtagtctcatctgcaaaatgagacttataataccatttccatctggaggcaggggcatggacgagatgacctcctaaggactctacaggcttttaggccatgtagggtgctgatgtgttgcttaatcagagcagacaaactctggggtgagaaggcttcctggaggaggtgtttttggaggggaggaaagtgtatcccaagaggcggtgtggttcagtggttagggttctacagccaggctgcctaccacaaatcccagccctaccactgacttggagtatctcactgagcaaatgacttatccattcagtgcctctgttttcttgtgtgtgaaatgggataataggacctaccatctggttcttaggaagtttgaacgagttggcctatgtcaggtgattggcacaatgccctgcctgtccgaagagccccctgcacgtgagctatgtttatattgctcccctagtgaaagcctcacagactcaaacccagctcctacaagaccttgaggtcccagcccaacggccctcttccacccctccaaacccctaccgccacaagcacacgccagacccaccacaccccccatgctttttcctcttcttggaactctctttctgccccttccttaccacgccccgtgaacttggcctggctggctgctcctcttcgcagcctttcctaaagcatccctgtctcaatcacacgaccaggcacctttagttttccgatcttccccggtagagggccagctttggaagggcaggggccttgcccatcttgttcatctgtgtaatttcagggctcagaacagcccctggagtgttacaggtgcttgatgtatttgctggaggaatgaacggatggatgaatgaatgaatgaatgaatgaggagttgaccagcctgaactgcagaggagggaatgctatgagggaaggccccactgcccaggccacctcacaggcttcctgcaggaccttggtcagtgttgacgtgagacttggcaggcctggctgggccctggagtggggagagagtcccagggaggcagtgcaggtggtgggcctctcaaagccccgcttgccagggaagaagtgcagcctctcggtacacagcagctgaaggcccgctagacaagggaagcttggagaacccggccaggccactgcggaggtgttggcagcccctcccaccggagcagtggccatctggcctggacagagggccctccgcaggccctggctcagccccagcctgggcagcctccctgctgctggcctgcgtcacggggcctgccgagggcagctgcaccctctgccaggcccgatgggaagggctggacagagccgaggcctcctgggctccctggcccccacatcccccaaagcaggaggtcaggataaaggaacttctctttcccagaaatccagtctgagggctctgaggatgcaggcctggagctccgcaggcctgcagggaggccaatgcctacctccaaggagaggggattcagggagggtctgggtcaggaggcctcccccttcccggcatccagacctgatggggaggtgagggcccacacggcctggatctgctgcctccatccctcttccccaacccccagcttgctgcactgtgcttgggcagcagaactgaggtgctcacagggtcccaaggccaggcctggggtggacagcagcccagggtgcagtggcatcacagtgcccaggtagctctcagctctgcttctcactgggaattcgtcctagtcacctaagtttcaccaccccctccccctgctggttccctagtgtggccacagccaggactgaccaatgtcggggacctctatgaaggacaccccagctccagagctcccgagggctcactggggccccagccaaccggccccgaggcccagcttcatcctcaccttcctgcagacctcactccctcgcaagcatctcccctgagaccactgcccagcacctcccacccagcatgctcctgaggttcattcccagggagcccaagctaagacacagggacagctgccttctacgtgtgaactggaaaaactatgtgagtccccccacacacccctacatcctccaagctcttctgccctgctcaggaaacaagtgtggagacggggctggaggcaggtgatgggcaggacctttcttcttcctcccaagaatactctgcagcaactctgcccatttcacagatggggctgggcaaggactctgggtctagaggcagcttgagggtttagaaagaggcacccaagcacggctgcaggtcagaatcattggggcacctgccaaaaatctggattcctggccccaccgattctgagttgacaggtctggggtgggaccaggcatcaaccattttgagggacccccacccccaccccagggtgaacacctttagagtttggcttcagcctcttgtcttggctgggccaggaggagatggggaggagggagaccaaggcttcaaggtgccgggggcccaaggcaggtcctgccttccatcctgacatacacattcagctgggggccctgcaggctcccctccctgagccctgggtacacctgaccacacccggaggctcaacctccaccttgctcccctggccaatcccggtctggggcaggagaaattgaagcaactttaccaaccaacaatcttcacttaaccgccacatttctcaacccccaccccactctctagcatgtcctctgaggcagactttgtcctgttttgttcatcatgcactggacctggcacatagtaggtgctcaataaaacatctgttgaatgaattcactggctggatgaatgtcccccttactagctgtgtgactttgaggatgcaaaagtctccttaccataaagtgggcgtaataacacctcctgccccaggggttgtggtaagtaataagccatatgggtgaggagctgagcccagtgcccggcacagagtcaagtctcctagatcttgccctgctgcccctgctgtgccctctgatggcccaatgtccctactcctgcccagaggcctcctcttactctgccagtcctcttcccagaggacagggccaactccaggtgtccagaccacgctgccacctgccagcggtgcccaaagctggaagcccctgcctgaatgccagagggacacaagatactgcgcatgggcatatacacacacgcatgcacacacatttgcatacatacatatacacatgggcacatacccatgctgcacacttcacacacccccacaccccacacctgcacacatatacacccatgcgcacatccacacacatatacctgtactgaacacatgcacatgccccgtgcacacctgttcacacccaacacgtgcacacacacacacacacctctgggctctgacctgctgcgtgtggttccctacagatccagcctttccccaccaggcctttcctgggcttacaggagtgggggtgctgatccctggatttcccatcccaaaggacagggtggtcaaggtccctccctgcaggcctacccctttcctggtggaacagatcccccttcaagacagaactcgctgcccagctgctctgaggagtgtggttcgaggacagcctcctgggggcacctcagctttctagcccggctcactcgtgctcttcaggggagggggcacaaagggccggttactggctgagcaagacaggggcccaggccctggctgtctccacccagagtggtctttgctttgatcccatgggctggcagaggcagcacagggctgcatcccaggctgccggctccccgtgctgcaagctgcttcctcctggctccaccactaaccaccacagcacctgcttcctggacagcctcacctgtgataggtgaaccctcagatgagaccagggcaggaatagcctcctcaaggccacccccagggccccaggtggcccagcctcagggtcgagctgttttacacaggccaactggcatttctgtctgtgaccttggtaatcccagcaccagctttatgagcatgggcttggttttcttttgttcatgagagggtttagtactggagcttctggatttctgggacagtggggaccagcaaggacctgtgagatgatctcatccacagatgaggaaaggaaagcccagagagggccaggacctgcccaaggtcacacagcaatgggacagcagaaacgaaatgcaagtctggtctcctgcctcccagcccagcagctgggaccagctctcatcctcaacagcccctccctccacacaccctggtctctgattttgttcctctgaaatcacacctcccccaggaaaactctgggtctacccactcctgtgccctgggaggtatagccccacattctccttgagaagtatctgtgtgtgttgcttgataaaggttcagcatcaatccgcttgccagctagaaggagaacacagctggactttgagacctgggttcaaagccccacattgctttctcttgtcatgtgatgctggacaacagaagccagccctctgagcttcaattttctcatctgtaaaatgggctgctaagactcacctaatggttcgttgtaaggattaaatgaagtgaagtatgtgtatgaacagctaacactggctaagcacttacagcagggcagataaatgcattatctcattacgtgtgacccaggtttggggaaaaactttccaggacagcacctgacatacccccaaatgccgtcttccccaaatgagctcccggaagtggagtcatcctcttcccttggtctcccctgcccacgctcactgggatgtggtgtgtgggtgggtgcctggtggtaagcagggcaccaccgcagagccaagaaaaggtttcccaaattcccccacgtactgggtcctgcagtttaactgaaccaccaacgttttgcgccttttttcctgcaaccctgaaccttgaatgctcctgtgctgccacctactggccaggaagataagagcaagcaggggctcatggaatttggggataattataatcagtaatgatatttaaaatatgtttaataaactagcaatcagcagagttctgaagcccctattgggctcaaggttaacgctttagaatctgggttgttagaagggtgaggtgccctggaggaggttattttgatattttattgaatgaaatagcccaaaacagcatcactgaatgtccttaatgcctaaagacggtccatgccctgacacttaccccaccccatagaatcagaccaccatgaataagtgtcctcaggccccccggttcctggactatttgtacgcaagatgaggagactccccatatggcccctccccacccccacccccaggtccagacccagtccttgcccctggaacgggacctggaagggaagcagacagctggggctgctgctgagagaaccttgggctgctaaaatctgagacgttctgagtttttgtttttgttttggtttggcttggtttggtttgttttttgagacaggatcttgctctgtcaccaaggctggtgtgcagtggcatgatcacagcccactgcagcctcaaccttccaggctcaggtgatcctcccacctcagcctccccagtagctggaactacaggcatgcgccaccatgccctgctaatctttgtgtattttttgtagagatcgggttttgccatgttgcccagactggtctcctaggctcaaacaatcctcccgccttggcctcccaaagtgttgggattacaggtgtgagccactgagcctgacctgagaccttgttctgagaaatgcctttaagtagtattccccaggctcccaaagacttgaatggcagcaaagattggtggggtttgggggattgcagtgaggtctgaataatggtgttggcagagcctccagtgatcatccagaactgaggacagagagggaaagcagcctgcccaaggtcagacagcagacccagtgacaagcccaaggcaaccgagaacctggaaactaatgcagaaacccttcgtaaacaggagacgctttctggtttgcctttcagaggctgcttcatgaagcccccaaattcccccacatactgggtcttcttaaagcaggaggcccctgggtccagagagaaaagaactctgagcaaaaccctcagtccctcgtccagcctggacccaggcttggccctgcctgcagttcctgacttgacccagacactgtagtgaactcaggcaggaggggccacacctgagaaccctcacccatcacagcccaggttctcttcccggctatcccccgggacagccccagagcatgagccaagggagtctggtctccacctaccttgcttaatccttaaagccagttgtgacacattgaataatgtcctcccccaaaaatttggaacctgtgatcattaccttccatgaaagggagcaaaggagaaaggactttgcggaagtgactaagcgaaggatcctgagatggggagataatcctctatcgtcctagcgggccctaaacgcaagcacatgggcccttatgagagagagagggagagagagagagacagagacagaggagaagctgggcgcagtggctcacgcctgtaatcccagcactttggagcccaaggcaggtggatcaattgaggtcaggagtttgagaccagactggccaacacagcgaaaccctgtctctattaaaaacacaaaaattagccaggcatggtggcacatgtctgtaatcccagctacttgggaggctgaggcaggagagaaagcttgaatcccagaggcggaggttgcagtgaggggagattgcaccaccgcactccggccttggtgacggagtgagactccatctcaataaaaaaaaaaaagagagagagaggactgggtgcagtggcttatgcttgtaatcccagcactttggaaagccgaggcaagtggatcacctgaggtcaggagttcgagaccagcttggacaacatggtgtaaccctgtctctactaaaaatacaaaaattaaccgagcatggtggtgggtgcctgtaatcccagctgcttgggaggctgaggtaggagaactgcttgaacccgggaggtggaggttgcagcgagccgagattgcgccactgcactccagcctgggcaacagagcgaagctctgtctcaaaaaaaaaaaaaaaaagagctagagagagagacagaggagacagcaggattacacacatggaagtggagaaggcaatgtggtgatggagacagattggagtgatgtggccacaagccaaggactgccagcagccagcacgagctggaaggggtaaggaatgaattccccctagagcttccagagggaacacagccctgaccccttgatttcagcccaatgatcctgattccagacttctggcccccagagccgtgagagggtatatttctgtcgtttgaagccatcaggcgtgtgatcatctatacagcagccacagacgcgaatccagggttcaacagacatctgtggcacaggctgcccttgcgcccagagctgtgcctgagaagtaaatggctcacagagcagacaagatgaagacataacccaaccacaaaagccccctggcccgccgggtatactttcctgcaggggaaaggtgggcacaggggagtcagggaaagagaggcgagaactggagtcttggctgcaacagccagtgagtgcattctcagttcaagccactgcactgggctccagggacttctttccactgttattgattgcactctagaggaaaattggaaagcacaggaaagtagaaaaaaaaatccacattactataagcttttgttttatttccatccagtcatttgttttccccacgcataagggtttggttttgtttttatttttttaattgtggtaaaatacacataacaaaatttatcaaagtgtacagctcagcaatattattgaatacacttacaatgttgtgcaactagcaccaccatccatttctagaactcttcatcttgtcaaacgaaattccatacccacaaacaataactctcatgccttcctccccagcctctggcaaccaccattctacttcctgtctctatgattttgactaccctaagtgcctcatataagtggaatcacacagaatttgtctttttgtgactgactcatttcatttagcataatggccttaaggctcatccatgtggcagcatactgcaggattcctttcctttttaaggatgagtaacattcactgtgtgtatgcaccacattttgcctagccattcattcctctgttggtggaaacttgggttactataaacattggtgtgcaaatattagatagtgcaaaatttattgtggtttttgccattactttcaatatctctgaggccctgtttttagttctttgggttatatacccagaagtgcaatttctgaatcacatggtaattctatgttcaattttttgtttatgtatgtatgtatgtatttatttatgtatgtatgtatgtatgtatgtatttattgggaatggggtcttgctgcattgctcagggtggtctcgaactcctgggctcaagcaatcctccctcaacctcccaagtagcggggattacaggcatgagcccctggctttatggtgtttgtttgtttgtttgtttgagacagggtcttgctcagtaatccaggctggagtgcagtggcacgatcactgctcactgtagccttgacttcctgggctcaagcaatcctcccacttcagtcccccaagtagctggaactacaggtgcacaccactatgcatggctaattttttttttttttttttttagtggagatgcggtctcactatgttgctcaggctggttgtgagctcctgagctcaatcgatcctcctgcctcagcctctcaaagtgctgggattacaggtgtaagccacggtgcccagcctctgtttaattttttaagagattgccatactgtttccatagagactatagcattttacattcccaccaatagtgcacatgtgttccaatttctctacatcttcatcaatacctattttctggttttgggtttttgttgttgttgtttgtttgtttgtttgttttgagacagagtttcgctcttgtcgcccaggttagagtacagtggcacgatctcggctcatgcaacttccacctcctgggtccaagccattctcctgcctcagcctcccaagtagttgtggttacaggtgtgcaccaccacgcctggctaatttttgtgtttttagtagagacaaggtttcaccatgttggccaggctggtctcaaactcctgacctcaggtgatccatctccctcagcctccaaaactgctgggattataggcataagccaccatgtccagccaattttctggggtttttttgtattgtttttttgttttttttttttaatagcagtcttcttaatagatatgaggtaatatctcattatagttttgattggcatttttctaatgctcatttttccatgtgcttattggccatttgtctttttaaatggagaaatgtattttcaaaacctttgtccttttttgaatcaggttgtttgtcttttagttgttgagttttagaagttctctatatattctaaatattaatcctttatcagatatataatttgcaaatattttcctccatactgtgggttgcctttttactctgttgatagtgtcttaggattaacaaaatttttttaacttttatgaagtctagtttttcttttttatgaagtctgttgtctgtgcctttggtgtcatatctaagaaatcattgccaaattcgatgttggtaagcttttgcctgatgttttcttgtaagagttccatgcataggtttattatttgttcatttcagtcccaagatgtcatctgtcacccaggccatctgaatccttgttaaagaaaagggcacaactgttctttgtcatgtccatccagctgcaggacttctgatacctccctaccatttgtcaaaccaaccccaactcctcagcctggtgtttaaggccatctgcatccagccttccctcctgactggccttccctccactggcccctatacatcctgttcacatggctcttctcacacgctcacccttgctccgtgcctctgctcacctggaatgagcttcttccaccttcctctaattcctataaacaagaatccactgagacagtccacattccagggcccctgtgctgggccctgtccaaggtcctggagatgaacataaacaagatgtgagagtggcgggagagggtcatggatgcattctctttaagactctttcggctttgaagaataagaaactgctcaaagtagcttaagccaaaagagaagcatatttgaagggacacaggaatttctcagaacagaagggcaaacagcccagtcagggctcatgggaactgggaattagaaagctttctgcctcgccgagcttcataatctctgggcctccacttcctcttctcccctccctgggctggctgcctctgctcacccattttgcccttgtctcgtcatgccactggcccccaactccacgtcattgcctctcagcccaggggtcaccaacaacaggcaacggtgtctatgcagccacatttcagactctctcgagagaatctacctggcttccacactctctagggaccctatttgtttggcatcctgtcactgactgtgggtgagcccatgggtccctgactcaggtgcccaccccaggtccaatcagctgtggctggagagggagggtgaggaaggcaggggccactggatcacaaggttgttcttcctggagattgcttctcccggatcagagtctgaattttatcaggatccctgggtgaatcatgggcagattaaagtgtaagaagcaggccgggtgcagtggctcagccctgtaatcccagcactttgggccaaggcaggaggatcacttgaggtcaggagttcgagaccagcctggataacgtggcaaaaccctgtctctactaaaaatacaaaaattagccaggagtggtggtgcgtgcctgtaattccagctactcaaaaggctgaggcaggagaatcacttgaacccaggaggcagaggttgtagtaagccgagattgtgccactgcactctaccctgggcgactgagactctgtctcaaaaaataaataaataagtgaaaacaaaaataataaagtgtaagaagtgcagctgtggagctgcggttctccgagagtggtccctgatccagcagcctctgcatcactgggcaacttgttagaaatgcagattatgggccgggtgcggcggcgcatgcctgtaaccccagcacttccggagggcgaggcgggtggatcacctgaggtcaggagttcaagaccagcctggccaacatggtgaaaccccgtctctactaaaaatacaaaaaatcagcctggcatggtggcgtgtgcctgtaatcccagctactcgggaggctgaggcaggagaatcacttgaacctgggcggcagaggttacagtgagccaagatcacaccactgcattccagccttggcaacagagtgacactctgtctcaaaaacaaaagaaacaaacaaacaaaaaaatgcagattatgaagccctatcttagacctgctgaatctgaaactctgggggtggggcccagtcctttgttttcacagccctccaggtgactcagatgggcaccaaagtttgagaactattgccctaaagcagggattggcaagcttttcctctaaagggctagatggtaaatactttagacttggtggcctcaactctgctgtcatagcacttaagcagccataacaatagataataaagaataggcacatgtggcaggcaggattctcaggcaagtctgggccctttttgatttttgctgccatgtcttggctgacctcagtttctggacttctggtttctgcttgacttgtcatcaaatgacctttgttctctcatggatctaacacttgctcttcttgtctttattgggagctcacctctccagtctgcccacagctcccacatggctgcctggtggccagcacagctcagaagcatgggtgacgggtaggaagtgttgtaggaacaacaggtttgtatgcccactgtgcgctaacagacccagtaactgagacagcagcgttgacagggagaaagagtttaatgatcgcagggcaccaagtgaggagatggagaccctcaaatccatctcccacagtagttttgggtgaggtctctaaggggattgtggagggtgagctagtgaagaactggggctgttgactggttggatcctttcaagaatcatgagtttcagtgccctggttggttcctacctgcgctcatgccccacggttggtataacaaatttccacaaaccaggtggcttaagacaacagacatttcttttctccccatctggagcacagaagtctgaagtttaggtgtgcccagcagggctgtactccccataaaggctctgggaggagtcctgtgtttcctctccccacctctggtgactttaggcactccttggcttgtggcaacatcgctccaatttccacctccactgatatgtgacctcctccgcacctttgcgcatttcaaatctccccctgcctttctctcatggtgcacttgtcactggatttagggcctgcctggagatccaggatgatctcattttgaagctcttcactaattacatctgcaagacccattttccaaataaggtcacatccacagcttcctgtggacatctatttggtggttgaggcacactattcaaacccttacaccaccctccccatcaaacacacaggaccagactagggacaattggtgtctccactccacctccatcctaatcagaactacaaaggacaaggtttctggtcatccccatactacagccagagccagaagaacatctgagaaataaggcatggcccctcttctccaggaacccatggctcaatggaagcagagctgccaagaggagtgccatatttctaccccactatggcagtgcctacccctgcccactagctcctttcaggttctggagctatgcccagaggatgagataacgcccacggggagccggagcatcctggagagcatcccatcctggatggatgggtcttgcagggcgcccagtgatcctgacacacacacaaactcccttctgcagcttccgttctcctagtgcaggagattttacagttgccaggatggcaattaggaagggaacgagcagccaaatggcgcattcttgggccccgcagccagcattctgtgctgcccgtctcagtgccaggaggatgagactttccagaaagcaagctatgtccagacaagatccatcctgaacattagctcagcaacaatgagggaaatgaagagtaagcaggcctggcctgctgtgcttctctgacagatgctgataagaatggtccagctggggactgctatacatgggcccagggaagagagaagcagctgagagttaaggagaattgaggacagagcgtcatggcaggaataagtaaataggttagacttgggttatcttcccagatctgctactaattcgctgtgcaagcttggaaaggttcgaaaagaacccctaccaatcgttagaaaaacaaataatccaacagagaaaatgatgggcaaagaatttgaataggcattttacataaaaaatacagatggtccaaaaaatatgaaaagatgttctatcttcctagtcattaaggaagtaaaatttaaaataaccagaacactagtcaaaaaagtagtgacatctgaattaagtccatagtttaattaatagcattgttccagtgttaatttctttgttttggtcactgtgtgtccacagtcggttccttccagtgggttcgtggtcttgctgacttccagaatgaagcctcggaccctcgcagtgagtgttacagctcttaaagatggcacgaactcaaagaataaacgcaagatttactgtgaagactgaaaagccaaagaataaacctgccacagcgttgaaggggacccaagcagattgccgctgctggctgggagaggctgtgttgggtggcggggatggggttggccagcttttattccgttatttgcccccgcccatgttccatttctgtcctatcagaatgcccttttttcaatcctccccgcgattggctacttttaggatcctgctgattggtgtgttttagagagcgctgattggtacattttacagggtgctgatcggtgcgttttacagagtgctgactggtgcattttacaatcatcttgctagctacagagtgctgattggtgcatttttacagggtgctgattggtgcattttacagtcctcttgctagctacagagcgctgattggtgcattttacaatcctcttgtaagacagaaaagttctccaagtccccactcacccagaaagtccagctggcttcacctctcaattgtattgtggttaggtaagatgctcacattaggaaaagctggagaaacggtctgtgagaacactgtatctttataactttctgcaagcctaaacttatttcaaaatgaaaaggtaggccacgcatggtagcttgcacctgtaaaaatcccagcatttcaggaggacatggcaagaggattgcttgagtccaggagttcaagacccagcctggacaacatagtgagaccccgtctctactaaaaaagaaaagataaacaacaataacagaaaacaacaaagaaaactgtttacccatctgatacaaagttttttggagagcactttggcagtttggattaccgtttcactgtgtgtgccccttgacccaggaattccacaacttggtattcaccctccacaaatccttgcacttgtattcaaagagatgtggccaagggtatttgtgatagccaggagcaacctaaatgaccaccaacagggaaaagttaaatgatacagcgtaactaaccatgaactactatgcagcaggtagaaagaatgccatatgctatgtgagcaaaaatgcaaaggtttccaaagcaaaaaagtaagctgcaaaacaatatatacggtatgatcttatggatgtaaaggaaaagcacaaataaagccatacatctctaaatgtatgtatacaaatgtacgtgcccatccaaagtcaggaaagatctccccaacatcccattagccagagttccctctggagagggcagtgggactggagattggaatagataggacaggcggaggtcatgacgaagactcactttttctgtattcttcaaatttttaacaataagactttcatgtattatttgtgcagtgtttgttgttgttgttttgggtttgtttgtttgtttttttgttttttgagacagggtctcgctctgtcgcccaggctggagtgcagtgacgcaatcatggctcactgcagcctcaatctcctgggctcaagtgatcctcccacctcagcctcccgagtagctgggagatgcgtgccactgcacccaactaattttttttgtagagacagggtttcactatgttgtccaggttgtatttttttgtagagacggggtttcactatgttgtccaggttgatctcaaactcctgagctcaagcaatctccccacctcagcctcctaaggtgctgggattacaggtgtgagccaccaacaggtgctaaccttctccggcatgcagttttcttgtttttaaaatagagttggggcagggccccccgagaggctgcttccagctctgactttctctttaccatgaagctgaggttgtgtcctattatgccctctttccacactccccctccccactctgcagcacactggtccaaccagctggcttctctctattcctcaaattttccagctcattcctgacgtagggcctttgtcctgtggtcgcctccactggcaagctcttcccacagcctcagatagctggctccttcttaccgtgcatagctcagcttaaagttcacctctgcagggaggcctccctgactgtgcagagtaacaacaaggtgggagagaagggcagagctgaatcagaaagggcctgtggactagagtgaggagttaggggttcagcctcaggagggtttgaaatgctcaaggaggaggctaggagatgaggagtggggctgggctgcctctgcacatcatcaaagccaacactcagtctaatccaaatcttgctagagcatagaacataaggtagaatgagtctttaagcaactgggagtcatctcgaggtaaacagaactccaagagtaacgaaggcccagagtgaatttattttgagagagtttcctgttggagtagcagacactctgcagtagtgtttttctctctcctgggtgggactgccctgcctatatgcacttaaggcatagagtttcctgttcttgcctcttctcagagccttgcattgaaactcaaatgtattctcagaaatttctctccacacaatgacatatcgcctctgtgcttttactctctttgtctttctctttctctcaaccattgttttccacccatcctctttttcctaaacttcttaagattgttggccatttccctttctccctcccctctctatgtttctgtgtgagatctgccatcctttaaccattcctcttccccggggtagccggttgtagctgatcctgcccaccctttccggtggtctctcagcctggccacaccttccacggctgggcccccctcacctgctcacagctggattcccccaggctgaacccccagaccagcttgcagggcttcctctctcttcattcttcccacaagcctagccaagagcttaacactcaccagatgcaaatggttaagtgcaactcgcttgggaagagggggtgttgttggttcataacgaactgcagagggcgaggggcagggaaagctccagccatgactcaaaccccatcgggcatctctcccctcctgtttctgtttctctcgggtgggctttctctggaaggctagaaccatggacactgcagagtgagggttcattccttcccagcttggccatctgagagtagaggagcctcttcctccagttccaactagaaaaatcccaggggtcggccaagcttggatcacaggctcacttgcacagccagagggatggccaccatagtagaagaccctgaccagaaccacataggggtatttctcctaaagacaaggacatctatgctctagaaaggggaaaagagtcccaggcagacaaaacaacaggtgtccacactgccccatgttcagcctgggaacccaaaagtctcaatcaatttcgaaagcttattttgccaaggttaaggaagcacccatgacagcctcaggaggtcctgatgacacatgccccaggtggtcggggcacagcttgcttttatacattttagggatacgtgagacatcaatcaatatgtgtaaaatgtacattggttctgtccggagaggtgggacaactcgaagcggggagccttccaggtcataggtaggtaatagacaaacagttgcattttttggggtatttgatcagcctttcaccaaatacacaatttacatatgagaggggatagaggaatagtcccttatgccttaatgtggctcagtgaatctgcatttttacgtaaacaatagggcagaggaagcaattggatatgagtttgtcttgggtgagcaaaagaatgactttgagttctgtcctttgtcccatacctgtgaagataagctatcaatttacattgccagggtgaaattccacagaactgttttagggtaaagatcttgaggcccacaaggaatttctttgtggacaaattgtgaggggggtatggagctttttaaaaaaatctttgtagctatcttacttaggaattaaatgagaggcagtttgactgacacacttcctggcttgacttttccctttggcttagtgatttgggggtcccgagacttaactttcctttcacaagcccacatggcctggtcttggtgtgtgtgaagacaggcttctcggcaggcaggtgagcccttgggaacacgagctgcttcacttccccacccagttgctgtcttcaagagcaagtgctggctccaacagcccctcctgcaaggcattcacttctaaggcaccagaacccttggagctgccaagtctgacttttgtcagcaacaaacccatacaggcgaaagtcattttttattttaaactgtcaaatctgggggccgattgtctcagaaatgcatcatttgaatacaaaagatgggctcacacttctctctaggatgctgcttcttgaagaatcatagttattttttagagctaagacccttagaggtcttctattccaaccccctcattcttacaaacaaggcaatgggcatagagaggttgagcattttgcccagttataccagatagtaagaagcaagggcaataagggaatccaaaagtactaactacttaactaatcctaactactaggtagttagtaagtagtcgggcaataagggaatcaacactaggggtttccatctgatatttgcaaaccagttcagagaaaaacgtggtaacaaacaattctcctggtaaagtgtgcctcactttttttttactatttttttttattttcgtagagacaatgtctcactatgttgcccaggctggtctcaaactcctgggctcaagcaatcctcccaccttggcctcccaaagtgttgggattacagatgtgagccaccacgaccagcctcactttttttttaaggcttcagatttaagccatagatacttttaaactatattaatattaaatcttaacttttctctcttgtgaattcatctataaaatgcttcatccttgtatgtgattgatcttcagtggtcatgaatcccagctttacatttctctggccatcaccactacctagggcatttcgggacctgtaaataaacacttcagggcaccatgggaatgacggctaaaggagttctttgtaaaaggttcccttcagccactggtcactctacctggttaatctagttcggagtttcacgcttgtcttcctcaaagaggaatacacccttatatttataatcgttcagtataatttttcttctttagttggttcttaattttgttttcatattccaaacccaaagtcaccagccctaacttgcaagagaaagaagttactgtggatgaacaagcaaagcacgtggggcccaagatgctattgttggacacaaaagcccttctatggctttgggagagccaatcccccatcacacagcgcaggaagaagggcactcactgtgctcacgctctgtgcagccctcctgaatttgtaaacaacccaaacgttacacaaacaagttgttgtttttcttagcttgctggtgtttttaactcaataaaatgtcaattaacttcgtgagctttcctttaactctatataatctttgcgtttgaatggctgccaatcaaacgcaaagatagatgttttctttgaatatgggccaatttccgtgtatgcaccttgttgtcaggatcagctagattatggtgtagtaacaatgtcgatatctcaatggcttgacaaaagtttggtttccgctcatgctacgtgttctgtgagatcagtggggagctcggagtttccacagttaccagcaaacggagagaattctggagggcctcgaacaggcaagcaaatgatctagcccggaagtgatgtttgtcactttccttcacatctcattggtctgaactggtcacatgaccccaggcaaccccagagggccaggaaattcgggctccttgtgcttgccaggaaaggagagtggccctgttgaaaccgcctgtgactgagacagtgaaagaaatttgacctaaccaactccatcttgcttctagcctccaagttgtccttgttcattcctaggcacaggctgaactaactttgggaggagattattatagtttatagtttaaaacaaagacaataacagcactttcccaaaagaaatttccttcttgcctgaggactaaactgcctttgtaggactgacaaattagccacaagattagaaattatgctttaggagtcatgcagctgaaagctacaagattctgaccctccttaaactgctcctaagatcagtgtttgagacattttgcagaccctgcacttgatggatcagctggcaccacccagatcaattaaatggctcatctgatcttgtggcccccgcccaggaactgactcagcgcaagaggacagcttcaattccctattacttcatctcctacctaaccaatcagcactcctggctcactggcttccgccccaccaagttgtccttaaaaactctaatccccgaaacctcaggaagactgagttgagtaataataaaactctggtctcccccacagctggctctgggtgaattactctttctctactgcaattcccctgtcttgagaaatcagctctgtttagtcagcaggcaaggtgaacccactggacggttacactgttgctcagcacagaactcagtgtacccacaacgctgcacgccagaatcccaccttcataccaggtccaggtaacagcatctttgaggagagcccagagctgaagcaattagtcaaaggtttaagtaccaattatgagagaggccctggacaggactgaggagtaaggaataggtatttagaccaaagtgatagaggtgctatagcatctagtgggtagaggccaggggaactgctacacatcctacaacacacaggacacccccacaataagacttacatgtggctgggcacagagactcatgtgtgcaatcccagtggtttgggaggccaaggtggcagaatcacttgaggtcaggagtctgagaccagcctgggcaacatagcaagaaccttctctacaaaagtaaaaataaaagtttgggcgctgtgattcacgcctgtaatcccagcactttggtaggccaaggcaggagaatcacttgaactcagaaggccgagaccagcttgggcaacatggcaaaaccctgtctctaaaaaaaatacaaaaaattagcgggcatcgtaacacaagcctgtaggcccggctacttgtggggctgaggcgggaggatcgcttgagcctgggaggtcaggctgcagtgagttgatatcgtaccactgcactccagcctgggtgacaaagtgagaccgtgtttcaaaaaaatataaaaaataaaaaaattagctaggcatggtggtgcccacctgtagttccagctactcaagaggctgaaacaggaggatcactttagcccaggagttcaaggctgcagtgagctatgatcccgccactgcgctccagcctgacctacagagcaagaccttgtctctaaaaaattttttttaatttaaaaaacaaagatgcatgtggtctaaaattgtgccatggtccagaaattctagatcagagtaatgcaaagttcacattttgggggtcggggaagcaaaacaaaaacaaaaataaatccccaaaacacaacaagcaaaaacatctgcctggagttccacccctgagtgctggattagcgaccaggccacagctgcccttgtaagaggcacgcaggaggcccatgaggtgagctgctgcagggccttgggcacggccagggaccgggtacgggttaccactggcctttactctccaaatgtcaggagcactacctcccatcagtgacaactaaaaatgtctccagacattaacaaatgtcccggggcaaaatctccccaggtgagaactctcctctaatagaacttccaagttggccccgcaggcactattttggtgcagaggaacccgtcaagcttgactttaaatctggctctgccactaaatcacccagggcctttcctctttgggcccccgtttccctgtctgtaaaatgagaggattgaacagggcagtccctagagtctgttcagaagttctcagactgggacttgggttcttgcacttttcattttgtcactgttgatgtcatcacacacacacccacgcacagagtggagtgaggatttcggctgcacagcaggatggcccagatgataggaggaggcagggggcgatcactggctgggaggatggctgggaaaagaggaggaaggggaaaggcacgcgaggtcacaaatgcaccaaaaggcatttcctggcctagccctgtgcctcccttctaaagagccatcacaggacctaaggaataagagacagagagggactggtaaaggattttgggaggagaagttaagaggataaacagcaagcagtatatacccagaaaagtgcaatgtgcccaagaataggagggaagtttgtggggtgtgtgtgtgtgggtgtgtgtgtgtgtgtgtgtttgtgtgtgtgtgtgctgtatccttgctattggcaagaagaattgaacagcttcaattcagtttgaatcagcctgtagcttaggaaaaagtcattatcgagggattattgagtttgctgatctcttaccggcctcttgccccttgttcagttgtaatcaaaagacaggggtgggaggggggaaaggaagagatgccccctgctccttaacattcacgtttccttctggtccatctcagaatgcaataaagtttgacagtgaccttgaaagggagtgagtgttatttaataaaaggctgttcagtctaaacaatgattcaggactttttgaaagccagaagagacagcctgaatgcccttttccatgctaggtcctctaaaaagggtttatgtatatcttttatttgtcttaggtctgtacctgtttcccacccccgacccccacctctccccaacccccactaactgaacacttttctgggttgctaataaactgagctcccaggctatgctatgctccacaatagcacctgtttctcagaagtatttcacccggctgttctttcatccatccagtctgtcagccattcatcagctattttcaaagaacctactgtgcatccagggctgttgatatggtttggctttgtgtccccacccaaatctcatctcaaattgtaatccttgtgtgtcgagggcaggacctggtgggaggtgattggatcatggggatggtttcccccatgctgttctcatgatagtgagggcattctcacaatagctgatggtttttaaagtgtttggcagttccacggccaggcatggtagctcacgcctgtaatcccaacactttgggaggctgaggcaggtggatcacctgaggtcaagagttcgagaccagcctggccaacacagtgaaactccatctctactaaaaacacaaaaattagcctggggtggtgacgcatgcctgtaatcccagctactcaggaggctgaggcaggagaatcacttgaatctgggaggtggaggttgcagtgggctgagatcacgccactgcattccagcctcagtgacagagcaagactctgtctcaaaaaaaaaaaaagcgtttgacagttctccctttgctgtctcctgccaccatggaagacgtgccttgcttcccctttgcctttcaccatgatttgagtttcctaaggcctctccagtcatgcaaacctgtgagtcaattaaacctcttttgtttataaattacccagtcccaggtagtatctttatagcagtgtgagaatggactaatacaactgtgttatgggtggagggtacaatggtgagtaaaatacaggccaggcattctgagtcatcacacgagagtgggcataggtatgttcacaggcgatcacaccccagcgtggtgagtgtggtgagtgggacacccacggcaactcctgaccctaaaaagggaggggaggcctccatagaaggagcccctgagctgagccttgaaggacacagggactactcaggcagagataagagaatgatccgggctgtgaaagacatgaaagagactggtgattcattgaactgtggagagcaagatgtgttagcatagtagccagcaaagtggggatggtgaggactgagaccaagctggccaaccgaggccacatctgccctgtcaaggggctctgctctagggctctgtccctcgttaccaagctatggtccattttaaggatttgcagtggccatgtcccacgaagttaccatgaacactgaatgaatgaaagctgaaccggggctcctaggggaaatacagcattagattcctgccggcctctgataacatcatcatcaattgatcaatacataacctttttatgtgcatttctgttttaaaatattatttaatatatgctgttcattcattaacatcaaactcacagccaacagcaccataattcatacctgaataaagcttatctaacgcacatattttctctataaggcacatcacagacttcttttttacttttttctttcctttagaaacagggtctcactttgttgcccaggctgaagtgcagtgtagcaattatagctcattgcagcctcaacctcctgggctcaatagatcctcccatctcagcctcctgagtagctgggactataagtgtaagccactacactcagttaattaaaaaaattttttttgtagagacagggtctcactatgttgtccaggctagcctctaactcctggcctcaagtgattctcctgtctcggccttccaaagcactgggattacaggtgtaagccactaagcctgccccaatcgcagccttcttgagcatagaaacactagacagcacttcagcactgcattggagggccattttaaacagtgaaattggccaggcatggtggctcacagctgtaatccagcactttgtgaggccgaggtgggcagatcacctgaggccaggagctcgagaccaacgtggccaacatggtgaaaccccatctctactaaaactacaaaaaaaaaatagccaggcatggtgccaggcacctgtaatcccagctactcaggaggctgacgcagaaggattgcttgaacccaggagacggaggttgcagtgagccaagatcgtgccattgcactccagcctgggcaacagagtgagattccatcaaaaaaaacaaaaacataacaacaacaacaaaaaaaaaacaatgaaatcaccaataaaaagtacaaaagtgaaatgcaaaaaatatgtggcactaaatagaccatgaaaaggacactcattacagtatgagagctgaacaagaaggcagggtgttgctttgtttgagctcagctgggaacatgtctcagagtaagcaaagtctttgccaccctgcacatgtccatgaatagccacaaaagtgccctgagccttgatttgggggttacaaacccatttttagcaagtagaaagattagcaaatattagaattatgaataatgaggatccaaaccataaatatgaacccctaaattctctgtacagccaatgactacgatgtgcatgagaatattttactagaatatttttactctctctacagagatttctcctctaatatagaagaaagacatgagtgaatttagggatatctatgggttgaaggctaaagatatgggaactcatatacagccacactatactacagcagtgtccaaacagacactgtgtcagcctagagacagcctgtcagagggtgacttacagctcatttcctgatgcgaggcaagccagacaagatcgaaacctcagagcccccagggtttctctgctgtgtcagctgtcagcactgacactctctgcgttcattcctatgtggaggagcgtcaggaagtcagtgtgtcttggacccaccagttgcagaccgaaacgcagcagcccacccagcaatgtgttgagagaacagtctgggcagcctgatgcttcagaattttccagaacagagtgataagtaaactcctggagctgctcaggcccagggattcttgtagggcaattgtgtatttgaaatgccagacattgcgctgacaggttttatttactattttaaagtacatattagaaatcataagtgtcaacgtatttttttaaaaaaagaaaaaagtagtatttgaaagcacagatagtttcctgtatggggaaaaaaggtatagaacacaattccttcagagtataatctccaagctgatctgctgaactcagcagggactttcctttgtcattgaagtgtataatttgttgcttagaatttcatttttaaaggacgtatgctacacacaatagttgaaagtgatcatctgaagcttcgcagagggtatctaacccccaatttttgtggatttccccagttatgttttaatttttttttttttttttttttgagacagattctcactctgttgctcaggctggagtgcagtggcatgatcctggctcactgcagcctcgacctcctggactcaggtgatcctcccacttcagcctcctgagtagctgggaccaccatgcccccaagcccagataagtcttgtattttttgcagagacagggttttgccatgttgcacaggctggtctcgaacttctgagctcaagctgtctgccatctcaggctcccaaagtgctgggattacaggcgtgagccaccatgccaatctattttttcatttttaatttaaaacatagactactttttagagcaattttaagttcacagcaaaattgagcagaaagtacagaaaatccccgtataccctctgctctatacagcctcccgcactatcgacatcccccaccagagtggtacatttcttacaatccatgaacctaccttgacatgtcattataacccaaagtccatagtttatattagggctcactcttgctgttgtatactctataggttttgacaaatatacaatcacatgtatccacgattatactagcatacagaacagtctcattgccctaaaaatcccccgtgctctgcctatccatccctccctccctgctaacccctggcagccactgatctttttgctgcctccatagttttgccttttccagaatttcatatcgttgaatcctacagtatgtagccttttcagagtagttatccccaaattcttgaaatcaatataaatatttatttatttacttattttttgagacagagtcttgctgtcatccaggctggagtgcaggcactatctcggctcactccaacctccgcctcccggattcaagcgattctcctgcctcagcctcccaagtagctgggattacaggcatgtaccaccacgcttcgctaatttttgtatttttagaagagacagggtttcaccatgttctcaggctggtctcgaactcctgacctcaggtgatccacccgcctcggcctcccaaagtgctaggattacaggtgtgagccaccatgcctagctagaccaatataaattaataggctgggtgcggtggctcagcttgtaatcccaggactttgggaggccaaggcgggcggctcatgaggtcaggagactgagaccatcctggctaacatggtgaaaccctgtctctactaaaaaatacaaaacattagctgggcgtggtggcaggcacctgtagtcccagctacttgggaggctgaggcaggagaatggcgtgaacccgggaggcggagcttgcagtgagccgagatcgcaccactgcactccagcctggacgacagagcaagactccgtctcaaaaaaccaaccaacaaactatatatatatatatatataactcacctgcaaatcactacattgtaagcaacttaagatcttagtcctcattgtattcacggtgtacagggacactcaaacacctgttgaatggatggaaagatgaatagcctgcctctccgatttcaaaagaaaaaccagaacactaatctagtaacagtgagtggttgtacttagtattacttagaaaaagagatgctaattctttttattccgaataaagaacagcttgtaaaaaatgaagcccaagccaggaacagtggcttacacctgtagtcccagctacttgggagtctgaggcaggaggatggcttgaacccaggagttcaagaccagcctgggcaacacagtgagaacctgtctccacacacacacacaaattatctagacatggtggtgcgcgcttgtagtcccagctactcggatggctgagttgggaggatcgcctgaacccagaagatcgaggctacagtgaggtctgatcacagtattacacttcagcctgggtgacagagtgagaccctgtatctaaataaaataagtatcaatgccagactataggtcatgagatttgactcagatcttaatattttggtaacttttaaatttccgattatatcttccataaagtaggatttcacaactgatagcatggtttctgtgaaagggatttctgctcacccttttcaagttttgtatttggggcactcttcaaatgatctgtcattcccctatgccaggatatccagagtgtctgcacaaagccaaatatgatgagaagatgagctcatggatcggtgatgccttgtccctatttctggaccccaggatcatccttgcttttttgacgatagagtcatgctgctgagtcatgggtaactcaaaccctcatctgcagttaccttcttcttgctagaacccgggaaacctggacaaggggcagttgtcactggcaggataatggagggaagggcaggtgggaaggaggcatccaggaaatagacacacagaaaggaacatgtgggtctaaacaataatcagtgagaggtaagtccagggaaatgaaagcatggatctgcctcacgttatataattaagatgttgaaaatgtccgcataaaccaactcacatttcatttgcaacaggagaactgacattaggggaacctggtaatggttcattttgtagagtgaagtatttgtctgtaatgttaatactctctttctaatttagctgtattttatattgatatttcccaatattggctttgagagagggctgtcgtgtctcatcaaagcaccctgtttagcagacaattaggcagaacaaatgcatgttagtctgtctaaatatgccctgaatttggtgtctgaatttacaatagaaaataaaggaatgttagtcttgaaggctgtcatctgtttcggtagaaaatgcctttttatgaaagtgttttcatgaaactatttcaaagagtaagctgctcatgataactgggaagaattaccaagtatgatggcctcttagcattattgtggctgttccccaatgtccccttctcctcctatagctggtatttagctggacacaagtccctgtaataaaaatatattttccagcctcgatggcaactttgtgtggtaatgtctaaattctggccaataggatgttagcaaggatgtcatatgtgacttccaggaaatgtccttaaagtaaagttgttctcttcctcatctcttccttctttctgggggctagaatgcagatgtaatgactggagctcaggcagctgttttggactatgaggcagcatgctaaggatggtagagaaatcatacagctggataagagctccctgatggtcttggagcttctaaaacagcctttgactcctacttctggacttctatgtaagagagaaataagagaaattgctgtcccttagcaatcatggttgggcaagggagtagcaaccggtgcccaggtaacaaacgtgttcctccctgctgcactgtataattgcagccctacttcctgctaatgactaaagttaattatcccttccaagatggtaacttttctttttgcctgctgatgtctggacctaaggaagcagaagggctcaggcagcagccacagctgatagttcaataaaactgtgctgtgtcccctggtggaagttttccctttgggagaccaggacctctaaccctgaagagcttagagctgtaatgatgtggcggtaaatgcggccacttcagttttcacccttggttcccaaacccatgtattttttcctgtcggggtttgttttctatcgctgctggaaccaattaaagactgggatacgttctaagaaatgcttcattaggtgatttcttcatgtgagcgtcatagagtgcacttacacagcctagatggcactaggtactactaaatgcctgggctatatggtatagccttttgctcctaggctacaaacctgtacagcatgttactgtactgagtactgcagcaacggtaacacaatagtaagtatttgtgtatctaaatgtgtctaaacatagtaaatgtatagtaaaagcagtataaaatagtataaacgcagcggctcatgccagtaatcccagcactttgggaggcccagccaggaagatcacttgagcccaggagttcgagatcagcctaggcaacacagcgagaccttgtctctacaaaaaatcaaaaattagccaggtatggtggcatgcacctgcaatcccagctacccaggaggctgaggtaggaggattgcttgagcccaggagttcaaggttgcagtgagccatgattgcaccactgcactctaccctggcagacagagtgagactctatctcaaaaaataaaataaaataaaataaaataaaaagttgaaaaacagtacctctgtttaggacacttaccatgaatggaacttgtaggactggaagttgctctgggtgagtcagtgagtgagtggtgagtgaatgtaaaggcctaggacatcactgtacactactgttgacttttttttttttttttgagatggaatttcactcttcttgcccaggctggagtgcaatggcaggagcttggctcaccgcaacctctgcctcccgggttcaagagattctcctacctcagcctcccaagtagctgggattacaggcatgcaccaccacacccagataattttttgtatttttagtagagattgggtttctcaatggtggtcaggctggtcttgaactcctgacctcaggtgacccacccgcctcagcctcccaaagtgctgggattacaggtgtgagccacagctcccagcctgctatcaactttataaacactgtacatttagtccatattaaagttattaaaattatttttcttcaacaataaattaaacttagcacactgtaacttgttttgctttataaactcttaaatttttaaacctttttgacttttgtagtaacgtttagcttaaaacacaaatacattttcagctgtacaaaaattctttctttatgtccttatcctataagcttttttctattttgtttttttttacttgttacacttttcttggtaaaaactaagacatcaacacacatattagcctagtcctacaaagggtcaaggtcatcagtatcaccaccatcttctacctccccatcttgtcccactggaaggtcttcaggggcagtaacatgcatgaagccgtcatctcctattataacaatgccttcttctggaatccctcacgaaggccctgcctgaggctgtttcacagttaacttttttttttaataagtagaagaagtacactctagaataataataaaaaatatagtatagtaagtacccaaaccagtaacacagtcgtttattatcattatccaattttttttttcaaatggagtctcactctgttgcccaggctggagtgcaatggcgcgatctccactcactgcaacctccacctcccatgttcaagtgattctcctgcctcagcctcctgagtagctgcaattgcaggtgcccgctaccacgcccggctaatttttgtatttttagtagaaacagggtttcaccatgttggccagggtggtctcaaactcctgacctcaggtgatccacccaccttggcctcccagagtgctgggattacaggtatgagccattgcacccagccatcattatccaatattatgtactgtacataattgtatgtgctagacttttatacaacagccagcaagtaggtttgcataccggcatcatcacaaacacaggagtaatgtattgtgctacaacatcatcaccgctatgaagtcactaggcagtagggatttttcagctccagtgtaatcttatgggactgccgtcataaatgcagtccattgtggttgtctggtgtatggctgtgctacaaactcagtggcttaaaacaatgcaaatatatcatcttagagttctgtaggtcagaagtccaacaaagacctcactaggctaaaatcaaggtgtcgacagggaggctctagcagaggatcctgcatcctttgtaaagaatttttacccttgtaaagaattgatggttcggctgtgccttccaagctgtgcttgaccaattctctcagggtagccgcttctagatggagaagcctatgatataaccagtggatcccgtggctgtgggttcactcccacccctcccctgcttcacctcttccagtttctagagtaggtggactccttagcacttggcctcttcctcatcttcaaagccagcaacatcacggccgggtgctgtggctcatgcctgtaatcccagcactttgggagactgaggctggtggatcacttgaggccaggagtttcagaccagcctgaccaacatggcaaaaccctgtctctactaaaagtacaaaaaaaaataaaataaaattagctgggcgtggtggcacacgcctgtgatctcagctactcgggaggctgaggcaggagaatcgcttgaacccaggagatggaggttgcagtgagctgagatgtcgctactgcactccagcctgggtgacagagtgagaccctgtctcaaaaaaaaaaaaaaaaaaaaaagccagcaacgttacatctctctgatccttcttctgtgtcacatctctcactcttactgcagccaggaaattatttccacttttaaggactcttgtgactatactgggctcacctggataatcggggatccacccgtcatctcaaggtccctacttttcatcacatttgcaaagttccttttgctatgtacactaacacattcacaggtcccacatggtgaaaccccgtttctactaaaaacacaaaaattagtcaggtgtggtggtgtgcacctgcagtcccagctactcgggaggctgaggcaggagaattccttgagcccaggaggcggaggctgcggtgagccaagattgcgccactgcactccagcctgggcaacagagcgagaccccatctcaaaacaaacaaacaaacacacaaacacaaacaaacaaacaaaaaccacattcacaggtcccagggacttgggcatgaacttctttagggccatttttctaccacaaggctgtaaaaaggtctttgattcaaggtctgtcctgcatcctggagtacgtctcctacccttgtaaagaattgatggttcaggtgtgccttccaaactcagggcagctgcttctagatggagaagcctatgaattaactagaggatcccgtggctgtgggttcagtcccacccctcccctgctgtaaagcagttcccttggtctcatgtgacactatgtgggaccctgtactggagaatcaaacacactgtaagccctcagataaggatactggcttaggcaccgaaggcaggaaaggcaaatccgtactcagatcatgggtctactcctgtcagaacaaattactgggccttatgtgtggagggaccccaacaaagtcaacctgccggttcgtctttttgagaaatggtccattctgaagacttagcactggtctctgttgcgggaggttggacatttggtggcagcggtagccttggtacatgggacccatcctgcacatagcatccatttctgtcaccactgctgcttcattcgtatgtccatcaggtcagcattgggacggcccatggcagaggccaactggcatcccccactctcgtcctcttgtctacttggttgtccactgtctcttccatagtaggtcatctctagtgggcattaacacgtggcacaaagatcaagctttgtgtgctcttttttttttttttttttttctggagacagagttgctctttcgcccaggctggagtgcagtgacgcgatcttggctcactgcaacctctgcctcccaggttcaaaccattgtcctgcctcagcctcccaagtagctgggattataggcacgggccaccacacccagctaatttttgtatttttactagatacgaggtttcaccatgttggccaggctgttctcgaactcctgacctcaggtgatccacctgcctcggcctcccaaagtgctgggattacaggtaccagccaccaggcctggccctttgtgtactcttgcctttgtcatccacatgcctctgcccagatctccttgtctccagtcttctaattgttccctttccacatctatgatcagctggccaggccattcaccactacccaaaagtttgtatatattctcaccttgagctctgctctgtccatacaaaatgggtgaacagctacaccacccaaatccctgcccattaggagggttttgccttgccactctctttcaaggccacccttgagtgagattgtagtacatttcctgtcgttttcagcctaaacccacaaaccaagccaagccattcacaaaccaaacttgctctttcctcttccatcagctggtcagaaggacccctcctataaccttaggtgtgtgtagagggagggtgctggtgcaactccggtgggtggcttgggagtctgaacagactgcacgtgcagcttgcttgtggcccaggtcctgtccatgctcaatcccagatgtacaacttccatctaacaatggattgttgctgggcttgcctaaccttataatttaactcatctgatgtaacccagttaatgaagggcagttccaggtgcaagatcagttggtatcccaccatcaggtgctccatttctaccagggcacagcagcgtgccaggagttgttttgccaaaggcatatgatcctccactgcagatggcatggccttgctccagaaccctgggagcctgcactgtgactctcccactggggcatgctacaagctctacacagcatcttcttcatcatcatgccttttgtactatagagtctgctgggttgatggctcaatcgcaaggctacttgcactgctgcctggacctactgcagagccctttcctgttctgggccccaattcaagctgacagcctttcaggttaactggttattattggtcaagtggtattcccaggtgtggaatatgctatctccagaagccaaagagaatgtctaagttttgtgcttccttcttcatggtgagaaatatgagatgcaatcatttgattttgactttggatggactgtcctgacatgctcctgtccacaggacccctaaaattgttcctggtgtgcaggctcctaaatatctgtagtattcatctcccaccctctagagtgtgtgtaacctaccaatgcctttaacatgctagccactttttgctcctttggcccatttagcaggatgtcattcacataacagatcaaggccatgttctgcaaaatgtccagatggcccagatctctttgtatcattcagggtccaaaacagggacagaagccacagagtaatttgaacaggaaaagtttaagataaagaagcagtgattccaacagaggaggaattataagggtgctggtgagcagtgcacagaggtagtcggggcatcaggagcctgcttgcactgaggcagagtaaggactgaggtgtgccatatctgtattaggggggccccaggaagcaaccctgcattatacaggtgagccagtgctggaaggtggatgcacaggaggagtcggtgtgtcaggagcttgatccctagcagagcagtgtaaatcctgggtgcatgtaacctcattgggagagccacagtgagctgggcacctagctggggccaatgctgtgagctcaccaaggaccccacactctgcgtatggagctggggcagaggccctctctcctgtgcctctggcaaccatacagtagaggcaagaagaagcaaaacccaagcatgacagaaacagcaagaaaagccttttcttttcttttctttttcttttttcttttttctttttttttgagatggagtctcactctattgcccaggctggagtgcagtggtgtgatcttggctcactgcaagctccacctcctggattcaagtgattctcctgcctcagcctcctgagtagctgggattacaggtgcatgccaccatacccagctaatttttgtatttttagtagagacaaggtttcaccatgttggccaggcaggtcttgaactcctgacctcaggtgatccacctgcctcagcctcccaaagtgctaggattacaggcatgagccaccacacccagctggaaaggcttttctttctgctttgtcgctctagggcatctacaacaaagcttaacctgatgctcaccacaagggagaaatgcttaaagtgtctagctccattatcacaaagcaggtaatgcagggtgacttggagatgagagtcaatacattgaaaaactggcacagaccagactgtgacagacggtgggaaagttaatgtatgggggggagttgtaaatgtatactgttgtccattccatgtgaatgtggactattttgaatcctcttttcagataggaagagaaaagaatgaattctctaacaatggccacacactatgtgtctgaaactgttcatctattctagcaaagatctggcatggtaggtgcaatggcagctactactccatttactttgcagtagtctagtgtcattccatagaatccctcttctcctacatgaaccatactagagacatgaaggtaactattacccttgcatccttcagttccccaagggtggcattaaccttctcaactctttcatcccgggatgcaatattgtttctgatttattatgttgacctgggttggaaggggactgcttggaggcttctcaactactatagctcttactccacaagccagctcagtgtgtatataggagaggatcacacacactccaagaattcatccttggtttcttttgatggtgcaggttgagcagtcccgttttcagtctcccatctctctttgccctcagggactctgtgctctattacccacttccacaactctctgtagatcaggctcctgggctgtcactccacctgtagatcacatccgggtcaaatatttctatctcgatttttcatgtgggagataatgactggatggggtccgtggacccagtggactcactgtcagccagaccttggccgggactcaatttattaccaggtctccaaatacttcctctctaacgaaggccgtgatgatacttcaggcctctggttatcaatgccagctcagacactgtgtcttacagtcctcaggatatttgggtattcctcttttcccatttgccatggtgctgcacagtccttcttaatgaggagccaggcttcttctcaatcaattggttctggatctgaaaactacctcaggtctgaaaactgggcaacgtgtgactttttactggggtgtctgccttagcttcctgatcattcatcatgatttattctaatggtgcaggttgagcagtacccttttgggtctcccatctctttttcttttctttgtttgtttttgtttttttgtgagacagagtcttgctctgtcacccaggctggattgcagtggcacaaggtcggctcactgcaacctccgcctcccaggttcaaatgattctcctgcctcagcctcctgagtagctggcccttcaggtgcccgccaccacgcccggctaatttttgtatttttggtagagatggggtttcaccatattgactaggctggtctcaaactcctgaccttgtgatctgcccacctcagcctcccaaagtgctggtattacaggcatgagccacctcgcctggcctggtctcccatctcttttgcccccatggactctgtgctctatcacccacttccataactctctgtagaccaggctcctgggctgccactccaacctggccagttactacaatcagtgcacttgcctggcttctgatggtgccccagttgtgcctcctcaggtagtggaaggaatcacaagaagactcctgaaagtatactcacatagggctttcataaaactaaagaaaataatatagcaggataaaggcaaacaccagggagctgtccgacatccaggcgcatcttcctttcaggtacataggatgtacttgatcttaggatgataaaccaccaagatacatgcaaaatgccttggtctcagggaagtcacaatctcatctaagatggtttttaatatccttctggtcacatagccaaaaccagcttgcatgatcaggctcaactaagataatctaacagaaaccaggtgaaaataatcaatctgtacattttcacttaacaatggtgacaagttggtacagaatatctgtagtagtttttggactcagtacagaactacactaatcaatggtttgcaaattccattctggatggatcacgactcagcactatggcttcgggatcccctagagataagcacaaggttgcagccaggaaaaatgacccccatacccacacagatagttaagggccaaaccacctctgttgttttgggtcctatcattctctctgctatcagtaggccttattctataagaacttcttcaatccagtattggcctacagagacagctaagtctacattttatttatttatttatttatttatttatttatttatttacttatgacacaggttcttgctctttcccccaggctggagtgcagtaggtgtgatcttggctcattgcagccttgaacttccaggccctgcctcagcctcccaagtggctgggactacaggtgtgcgccacaaagcctggttaatttttgcatttttttgcagaaacggggttttgccacattgcccaggttggtctctcactcctgggctctagtgatccttctgccttggcctcccaaagtattgagattacaggtgtgagccaccctacccggcctgaattttttattgatgctggtgtcccctctcatcagtacactctgatgtcctcagaatggttgtcctctgcgcctccctatggaacattaccatcaggtgggttttctggactttttgcagtgtgtctactccagaaggttactgcccttccccttgtgacaccttcctctactgtccaccaggacaatgatggcatttctaccccatttactacgggctttattttttatttttatttatttatttatttattttttgagacaacagtctcactctgttgtccaggctgtagtgcagtggcacgatctcagctcactgcaacctccgcctcccaggttcaagcagtctttctgcctcagtccaccagtagctgggattacaggcatttgccaccatgcccggcttgtttttgtattttttttttttagtagagacagggtttcaccacgttggccaggctggtctcaaactcctgacttcaggtgatccacctgcctcagcctcccaaagtgctgggattacagatgtgagccactgcacccagcaggcctttatttttttcatgcttctaagagtgagttcatagaatctctgggagcctttgctaggatgttaaattgtgtattatgggatagaatgctcccaagtcaacacagtctccctcatccaatctcatgttctggccaccttgatcaagcaccctcagcattcagtcccacatgtccttcccagcttcttgctggtgtatgctggttaggtcttgcagctactttggggtataatcccttttctcctttattaggcccatcatgtccctgagttatactgtgacttaaccctagtttacatttcatggccaggaggggaggtgggttccttgttgactgtgggaaaaagccttggcattttcgagtaggagccagggaagggcacttctgcaggctcagagcattcaagagaatctggaaatccaagattttcaggggcatcaactcagatgtccctgtttcacatgtcagggtcccatcctttcccaacaagggctctgaccttgatatagcaggcctaccttgcttggaagctgcattcgtcctttctcatgctgctaataaagacataccaaagattgggtaatttataaaggaaaaaggtttaattgactcacagttcagcatgtctggggaagtgttaggaaacttacaatcatggcagaagagaaagcaaaccatcctttctcacatggtgacaggaagagcaaagcggggtaagccccttacaaaaccaccagatctcatgagaactcactatcacgagaacaccatggaggtaactgcccccatgattcaattacctcccaccaggtccctcccacgacatgtggggattatgcgaactccaactcaagatgagatttgggtggggacacagccaaaccatatcagaagcttaaccttctttggagcatgattattcagttgaacctaagttcagtagtcacccagttatgctgtcttcagctactattttccatatgtttctcaaacatctgatatatcacactggctagtgcactttcttccaccagcataccatctcaatttaccactttaacaattggactgccactttgtgtcagggactatctgtgctccaactactacaagtgataaggtcctcactgacagccagggagcaagtgatccagctctaaaactcaccttatcatctgctttcctagaccactcctaacaaccaactattctgggttgagttctccaagaggcagagagttcaggatacagaatgttgttttgtttttgttgttgttgctgttgttgtttgtgtgtgtgtttgggcttttttgagacggagtctcactctgttgcccaggtagaagtgcagtggcatgatctcagctccctgcaacctccacctcctgggtttaagtgattcccctgcctccacctcctgagtagctgggactacaagtgtgcgccaccacacccagctaatttttgtgtttttagtagaaatggggttttaccatgttggctaggctgctcccaaactcctgacctccagtgatccacctacctctgcctcccaaagtgctgggattacaggcgtgagccaccacacccagcccagaatgtttattagaatgcacaattaataccagaggcagtggggaaggaaggactgagcagaggaggaagttgagttgtgattcaacccaacaactgcctggctggcatggggagctctggagttaaatagggccatcagactttcccagtgtggggccaacatgactgggtctttatacccccacctctgtcagtcactcaacgtggtctccctgcaacaaggtgactcttgcagccgagacaatccctgaagggacagagggctgaagcctgtctgccaacagcactcccagtggctggaacaagtccttccctataggggaatctgggcggcacacctccatctccatgtccatcacatacgatatcacagacatttaaatattttgataactgtacataagagtttcctttataatcttatagatcttattttatgcatttgaaaatattcttctgagacagggcttttatcatattgccatagggtgccacgatataaaaaaggttaaatactctctgattcagaagtatccaatgatgacttctctctcatgcatttaattgaaaatctggtttttctccttctctgctagttctctacctctctccccacctcccacatcatagcctattcacatatgtctgaatctcatgatagacaagttcaggttcttttcccaggttctttttaccacatccccccacccccacataaaaagtatatatggcacagcctaggttccacccaaatcctttctcctcttcttcctgggcccacaactctcctacatacattggtataccttgcgcttagggatggccatgtgactaagttctaacagtggaacatgatcagatgccacttccagcctctaagacagccagtgtgtttcctccataagctccttctcttcctcccaactggagactctaaatgatgaccctgcctcaagcaagcaaacaacaagtccctcaggggtggtgtaggctgcaaatggaaggagcttgagtcccaaaccttccacggagaaggctggctaccaacctggatcactcacccaagactgctcgaagagttggtttgaaccattgtgttttggggtctatttattacaacagtttagcttgctttgtgaatagatttagtggcagagcctccaaattctatagatacattgatctcagtcctaaccgcatctggaacaccattaaataaaggaattgcaaacccagagaaggtaatgaatttgtctaaggtcatacaagatggctaggatcaggacccaactctccagttttctttcttctctgctattctgccttctgtgatcctacataagtgggcatgattgtataacatatgcggccatgagatttctctttcagcaagagaaagggacaggaagaaagagagggaatgcattttcttggcctgaattagtgtgagccattagttacctacattgactaaattatctggaatgaacattcaactctacatcacatatagttaaaatgacagatctgcttaagattgtttctagcatacgttatttcaatttaggcaaatgtgaccattcagtgtgaggggaccatactgtcattaggtccctgtcagttctcaattatactgttatcttagagggggaaaaatgtgaaatttgaatgtagacgagtgttgatttgactgctacagtttattttacgtatagaaataaaataatgtgtagcaaaagcattattacaaagatgataatgaaataactagtatttataatagtataatagtatagtatttataatagtatgatagtttaatgactatttgtcagatgttgtgtaagaaactttatacacacacacacacacacctcatttaattcctgtatcaatcaggatacaggacgctgtggtaacaactcctcaaatctcggtggcttgcacaacaaatgcttatttcttttttttttttgacaccaagtcttgctctgtaacaggctggagtgcaatggtgcaatctcggctcactgcagcctctgcctcctgggttcaagcgattctcctgcctcagtctctcgagtagctgggaacacaggcacgcgccaccacatctggctaatttttgtgattttagtagagatgggatttcaccatgttgctcaggctggccttgaactcctgacctcaagcgatccacccacctcagcctcccaaagtgctgggattacaggcatgagccactgcgcccagccccaaatgtttatttcttgctcatgtgacatgtacttcctcgagtttttccttcctgagatctaagctgaaggaacagctctctggagccacgccattctggtggcggaaaggaagagtaaaagtggtagaaccttgcaatgctcttgaagcgcctatttggaatgtctacatcatgtaaatggtaatggacaagtatgtataatccccacaccaaaaaaaggggacactattggggacaataaccacatttcaatgctgcaagacggatattgactgcacccccttcccactttcagaaagaagaagagtaattttgctgaactccttctagagactggaaatgtcccttccagttggggtgattagggaaggctttggtaaaatttgagctagagtttgaaggttaggtagactactggtgggtgaagaaagaacaaggacctttgtaggcaaaggaaaacctcagaattacagaggtggaaaaagagttctagtcaagccacttcagctggctacagagtaggtgggaaagaaaatgggaggacaagggctcagatgatggggggttggggcattggggggacacttgaaagctaaactaaggggttgaacttaatttaggaggcagttagaagcttttacatatttttgagcaagagagtgacataattaaaatgatctgggccaggtgtggtggctcacacctgtaatcccagcactttgggaggctgaggagcttgggtcacctgaggtcaggagatcgagaccagcctggccaacatggtgaaatcccgtcctactaaaaatacaaaaattagccgggagtggtggcatatgcctgtaatcccagtagctgggaggctgagacaggaaaatcgcttgaacccgggaaacaggttgcagtgagccgagatcgtgccactgcactccagcctgggcaacagagcgagactccatctcaaaaaaacaaaacaaacacacacaaaaaaccaaaaataaataaataaaatgatcacttctgaatactgatctaactaggggttgcagggtgggctgatatagggagaaactggagagcaaggagatcactaaggtccctacatgtccagaaccaagatagaggtcttgaactaggatggtggcagttagaacaacaacaacaaaaagtcaattccaggctgagtgcagtggctcatgcctgtaatcccaacgctttgggaggctgaggtgggagttagaaagcagcctgggcaacactgcaagacctcctctctaaaaaaaaaaaaaaaaaaaagttagccaggtgtggtggtgcccacctgtagtcccagcaactcagaaggctgaggtgggaagattgcttgagccccaggagttcaagcttgccgtgagctacgattgtgccactgcactccagcctgagcaagaccttgtctccaaaaaaaggtcaattccactgacttttctaaggtgtacaccatcaaggggcagctccatctccaggccattggctcatgagacattctgtagtcagaaggctagggcagattgctttgagcaagcccccatggtggttctcactcctacttctttgggtatatgcccctctgtttaaaaataaagttaatatgcatttaaaaaaaaaaaggagaaaaaggtcagttccagaaactgtgtgaataaagcattttacttgctttttctattaatctataacatatgttgattttttaaaaagaatataagagctatgcaaattggagcttcaagacaacttcccatctccctaggaggagatggctgccctaaacccccctacatagaaatcatcccactgcttgggcttaaacttgatgttggggaaatgaaaaatccaagctaaggccgaagcctggggcctgggcgaccagcagaatgaggaccactggtcagtttcaggctgaggtgcgtcttccaggggacaatctctagctggcccttaaacattcagacttcaagctctatttacagcataaaggtgtttcaaaagacgtgatacaaataactgcaaatgctctgcgatgtgttaagcactgtttgaaattcgtctaatttaagatttttttttctgacgtaacggttagattcacgtttctttttttttaagtacagttctactgtattgtaactgagttagcttgctttaagccgatttgttaaggaaaggattcaccttggtcagtaacaaaaaaggtgggaaaaaagcaaggagaaaggaagcagcctgggggaaagagaccttagccaggggggcggtttcgggactacgaagggtcggggcggacggactcgagggccggccacgtggaaggccgctcaggacttctgtaggagaggacaccgccccaggctgactgaaagtaaagggcagcggacccagcggcggagccactggccttgccccgaccccgcatggcccgaaggaggacacccacccccgcaacgacacaaagactccaactacaggaggtggagaaagcgcgtgcgccacggaacgcgcgtgcgcgctgcggtcagcgccgcggcctgaggcgtagcgggagggggaccgcgaaagggcagcgccgagaggaacgagccgggagacgccggacggccgagcggcagggcgctcgcgcgcgcccactagtggccggaggagaaggctcccgcggaggccgcgctgcccgccccctcccctggggaggctcgcgttcccgctgctcgcgcctgcgccgcccgccggcctcaggaacgcgccctcttcgccggcgcgcgccctcgcagtcaccgccacccaccagctccggcaccaacagcagcgccgctgccaccgcccaccttctgccgccgccaccacagccaccttctcctcctccgctgtcctctcccgtcctcgcctctgtcgactatcaggtaagcgccgcggctccgaaatctgcctcgccgtccgcctctgtgcacccctgcgccgccgcccctcgccctccctctccgcagactggggcttcgtgcgccgggcatcggtcggggccaccgcagggcccctccctgcctcccctgctcgggggctggggccagggcggcctggaaagggacctgagcaagggatgcacgcacgcgtgagtgcgcgcgtgtgtgtgtgctggagggtcttcaccaccagattcgcgcagaccccaggtggaggctgtgccggcagggtggggcgcggcggcggtgacttgggggagggggctgcccttcactctcgactgcagccttttgccgcaatgggcgtgtgtgtgtgtgtgtgtgtgtgtgtgtgtgtgtgtgtgtgtggaggggtccgataacgacccccgaaaccgaatctgaaatccgctgtccctgccgctgttcgccatcagctctaagaaagacgtggatcgggttctagaaaagatgactccctgcacgcccctccctgcacctcccgagcagtgattccgacagggccttcactgcccctgattttaggcgggggccggccccctccccttttcctccttcagaaacccgtaggggacatttgggggctgggagaaatcgaggagatggggaggggtccacgcgctgtcactttagttgcccttccccctgcgcacgcctggcacagagacgcgagcagcgccgtgcctgagaacagtgcgcggatcccactgtgcacgctcgcaaaggcagggttcacctggcctggcgatgtggacggactcggcggccgctggtccccgttcgcgggcacgcacagccgcagccacgcacggatgggcgcggggctgcaggtgcatctcggggcggatttctttctcagcgctcggagcgcagggcgcccggcgtgtgcgctccctgccggaggcgcggggctggcgcgcagggctcgcccctcactgcggcagtgggtgtggaccctggtgggcgaggaagggggaggataggctgtgcctcctcccactcccgcccccagcccccctttttttccccctcggaacgcgaggtgccatcttttttcggcgtgtcacgtctttacggtgccatgccaaaccgggtggccgggcttcataggacagggcggggcctggcattaaagggagggggacaatcagcgctgaaatcttggcgttttgctgctgcgggcgtgagcactgggggcgttcgcccagcaccttcttcgggggctctttgctttgtctgtagaggttacgtgatctgcgctcccagccctggtttctggcttttattctgagggtgttcagtcaacctcccccctacgcccatgcgcctctctttcctttttcgctcctcatttccgagcccattgttggatctcgaggcttgctgggttcgatgaactcgagtcaaccccccgacccccggcacgcatggaacgggcgtgaccgcgcgcagcctcgtctcggagtctgccggcgccgggaagcttctgaagggatgggattcgagtctccgtgcgcgctgcgggcggcggcagagggatctcgcccctccctacaccccaagtgtcctgagggccacgccacaccaggttgcccagcgagggacgctggctacccatccggggatgggtggggagccctggcggggcctctccggctttacgccctgttgcttcgcctggccggagaatgtgaggaaggggcataaggttactggtgcttcggccacacccatctttctgagcccactggactgggcgcagaggggggattgccatggaaaccacaggtgtccggagaggggatcttggggctggcctcaccccttccctgcggagattggggaccctggggtagggggagccgcgcccagtcggcctcctggaggacacgggaggaagccccgaacccccgcgcctgaggctgtttctgattggcccctggaggccgcagacacgcagataggcggccctgggtgtatttttattaatattatgtccgtactgattaatattatttatcttaaataaatttcacccgtgtccaagttcaccgcgcccccaaaaccgagtctggggcggcagggggaactcctggccaacgaatccatgcctcgccctcctgtgatgaacctggtacgcacggttttctggttaattctatcgctgaaaactggtgcggggggcgcacttctgagacggaagagcatctaggagctgaatcctccacgcgggtcgcccaggttgatctgaatttctggggaatggcttggctgcccgcccgggaccaggccgaccctccttgacggtggcgtagagggctggagcctgggtactgcgaggctcctcgcatggctgggcccgccgcgaggggttgcagagcggctcagggatcgattcaagcatcgtctctcctccctcgcccccagacagagctgggcgcggggttccccttccagatggagcgagggtctcggggtggccccggaaaaggggagcccgcggccacggctacgtattgccatctcgcgagcagagatgtcacctcctgcctttggaggaaagggagcccggtggggatgagcgcatttagcccaatgctgggaacaaagcgcactccgcgcttctgcgatttcgctccattttgaaatgtgttggcgctttggtggggccgctgcggtgggcaaggccgggggcgctgttaatggaggaacctcagggggacggtccttcgtaggaaactctatcctggctctgcgcgcgctttaaggaaatggcttccctccaggacctcgagggatgcagcttttgcgcggatgacggtggggtgctgaaccagccggtgcgcctctggaaatgtctgggcacggatcctggggccatcgacgactcctccccattcccagcaggcgggagctcttacattccgagcgagtgacccctctcaccctctggcgctcacacacctgtaactccaaacctccgtctcagaatggtccaggctggaagggatgatgggggctccgacagcgactgcctagctcacccctctgcgtgctcaggctccaggctcagcaggaccaatttgagttctatctgatccccctcggccccttaactgacccatcctacaggagacagggaaatgtctttcctaccgcggttgattctggggtgtcattttgtgttttgtgatggctgcttatatttactgtataagcattgtatttactgtataagcattgtattataattactgtataagctgcttatatttactgtataagcatctccaaatcctccctctacgtaaacaaattaatggataaacagataagtgtatcccctgcccccacccctgctacgcaggtccggagtgactcttgaagctcatacattccttggccaagtttgcttctctaacagatgtttatatagcaataacctggcttggctcttgggttcacctttggacgatttggggaaggggcttgttggctttgctgggttttggatgagtgacagtccatgactgttcctgctggaagggcgtgacttttaagtggtttctaatatcaggcattgctcctccgacaggaacaaaagaaatggatactgcccataaattgttagaaaacttagaatcgctttgattgaggaaaggttagatttattccggttggaaaaagtggcctttctattaaacgtgccctttgaccctcatgcccttggaggtcggtgccagcctggagatgggataagattgtggttttccttctgcctttttaacatctgttgttacagtccatttgttgaaaatttaaagaaactgttttattccactttccctcagcatttatgtgtgtggtttcagtagctctgtggctatatgtacgaacacgtgttatttttccaattggacatgtgataattttccaactggaccttgccttctattgatgtatttatttagcatcttccttactccctccttgaaaaagaatcactcaaaaacaaataaaaacagccgtaggggcctaatacagtgctagacatacaagaggtattcggtccataccaaatggattttatccatgaaggataaatggggaaatacagtgggaagcaggtgggaaactgcgtttgactctgctctttcctccaccaccactttcctcatcaccgtgttcagagacccccaaagccccctcacactcccagaaacacccccctggccactcctaacttgccatgcccaggagttaggtgcttccactagtgacatggagctggcgtttggggggcacctcagcaggtgacgggaagagaagaccccagcctcaccagctgggctgcagcagggagaggagtcctcatgttccagcagggactctcagctgttttcctgtaaaaccatggttctcaactgggggccactgagatgtctagagagatgtttttgttttcacaactcggggagggtgctactgacatcttgtgggtagaggccaggaatgctgttaaacatcctacaaggaaggcacaggacagtctcctacatcaaaatatgacccagtcccaatgtcaccactgctggggttgacactggcactgctatcttaattacattcattgagtgtcttttaggaggccctattctaagtgcttgctaagattatctcatttaatcctcacaacacttccgctatgtagcaggtgctgttattatctccgtgatggggaaactgaagcacagagagggttagtaacttgctaaaggtcacagagccagtgggtggtggagctggttgcctgacactagttccctcccctctcagccacatgtgggtttacttggccattgtggactagtctgggaacccagatatgatctataacattgacccagtagaatattgattccaaaaccactgtctcacaaatgaatttttacaagagtctgtaatcggagcatgacccagaataaggttagggagatgtggagttaaagctctcaatttcttatctggccccgacacagagagcaaggcatttcactctacattggtgctctgtttataaaacaaagagcaaatatctcttcctaaggtccttaaacctcttcccccaatccagggtttctggactgctctgccatatgacggggcagctggtttgattgacccagggaaggctggaaatcaagactgggggatcaagacgtagattcagtgtggccaaggtcaagtctctgaggtttagggacatcagatccccagcttaggttctgtacctcggcaaggtgaaagcgttggcgcccactgatgaggcctgctctgagattgtgggtgtgggttgagttgggtgggcataggcaagtcctcttgtaagaatcttttggcaaagatgggcctgggaggcttttctcacttcctggggcccaggctttgcaataagtattccattatactgtggtaccttggggctacctgagaatcctctgtctcgcccctgttgccttgccaaagagtttgctgtccaagaattcctttcctgtctccaggtgccatgctcctgccacctctgccaggttccctgcctgcccagatggctcccaactgagtgtgaggaggaatttgagacaggttttgagctttctgggttctccagttaggaaactttctgtaagcatgcagatagaatgggcttcagcaaaatacaaactcgaacaacttccatgtatagtcccttaattttctttgcttttttcatatttcatcaggctccatgctgagcccaatcagggacccgatagaaatccaaacaccatgtcagcgagtccccaagaaatgcattttgtgccaaggctattcaaggaaggtttgggagcagctcaagggcagacactgttaccctcccccaggtccccagtgcagggcagtgttctgcatgtggaggcagtttggcctaatggttaaggaggtaggctctgatcgggcctcctgggcacaaatcccagctccctgctcactgtgagacctaagccatattgtttagctgcttggagagttttttgtcatccacaacttggagtatgatggtacctgtctcacgggttgccatggggttcacacaagctaacccggtactcactagggccaagcacatagtaactgctcagtaaatggcatcatcggcggtgtcctgtggatgagtgcttgtgattggctgaatgaccagaggggtctaaagatcctggtgatggaatcagttgtacagataaattgttacactgagtagggatcaagataggaaaagtcggcaactacccagctcccctgcaccaaactgggcagaagtggatcctctgaaaattgcacacacccatgtttaaatgtacacacagaactcttgccacaggcaagcggagatttgtcatctgctgtccctgcctcatcttcttcctgaaatccactccatgccaggaataaactgcatgctctccaccagcccaaactgacctgccttcccgccagccatcccgggcagggtgacctggcttagtacatcgggttcagagatctttccagtttactcgttgaataaaaagtgagggctgatcgagaaagtaatggcagtcagggaaggcgaaggaggtaaagaagagattttacaaatgaagtaattcaacagagtgctgacattggtaaactggcaaacagatttcagggtggttggttgagagtagagtagaaaaggattaaataaagcaaacttgtggtgtactgaatcttaggaattccatgtatccaataagtatagtcatttatgaattaataaattcggcctaagaagccttcttatcgcttaaatcaagactaagtaacaatatatcagttttaaaaagtcattatatcagaaaatcatttaaatgatacacatagatttccaagattttactttaaccgaaactatataaatgtgaatttgttcacccatcttttgacacagggctcaggtcttctcttggtgtctggatcagccagttgaaatttcttgtctgttttgcctatgccacattaataatgcactgtctgggtcctccgatttcagtttggattttgggtttacattgtggagtcatctgaatgcagaatccttcagggattttacttttttttttttttttcatggtctttaccatcccatttgatagtaaatattactcacctttatgaagtctttccaaaacattcaactaaattttcttaaaatcattgaatgatttgaagagcttattcctcagcacttttactccatcagcttgcaccttattttttaatctttttttgagacggagtctcgctctatcgcccaggcttaagtgcaatggcgcgatcttggctcactgcgacctccacctcctgggttcaagcaattccgcctcagcctccgccgtagccgggactacaggtacacaccataatgctcggctgatttttgtatttttgtagggatggggtatcgccatgttggccaggctggtcccgaacttctgacccaagtgatccacccacctcggcctcccaaagtgctgggattacaggtgtgagccaccgcgcccggccagcttgcaccttatttaggatatgtgattattatagcaagtctggtgtacatacaagattttgaatgggcacagatgacctttagtaagtgcttggctgtgataagaggcagtcctgactgcagatcaggctgtgtggaccccagccttgcatgtttacagaccttcatgtcttattcttacagggtatcagaagaacacctactggggaaacttataaattagtaaaaggtgggcattctccccgcccatcttctgtctgtctgccaggactagcacagcactttgaagtcattcacatagaatcccaacttaagagggtaaaatcctcctcaacagactgaaaataagtttaaattccctttgctatattaactcccctgaggaaagagtcttagatcaatgtccaacactaaaaacagttttaaatcagcaagtgagaattaaatctgaagcaattgataataatgtttcattcattcctctcctttggccccgtccaccctactgctaaatccaggcatcaaagagaagagggacataattatctctagtcccagctgctggttttccttccagcctatggcccagttttctgttttactgagaaggctggtgatgttatcttgggatctaagtctgcagtttcaccacaaaaagtccagggatgcactttcatgcttgtgtcctcctccctgggatagcaaggatattagaagacccctggctctgtaattgcttgtcatgtgctctacagacgccacagaatgccaagaacgaagtgctgggaaggacaaattcatggaaccgtgggacggtgctcctcccccagcgtaaaggacagctcctcctcctgaattggagccagcgttctaaatcatgtgtcaacagagttgtcctggatcggatccagttctgccattgatttgcaggtcatttcagtggtacctgtttccagttgttcttaattgaacagtggcaccaaactattgtcttgcctcatccccctcccatggcctgtcccccaaaaagagacttcttgggtaattaatcagggcaacatcaggcagtctgggcgcggtggctcacgcctgtaatcccagcactttgggaggccgaggcgggcagatcatgaggttaggagattgagaccatcctggctttgtgaaaccccgtctctactaaaaatacaaaaaattagccgggcgtggtggcgggcgcctgtagtcccagctactcgagaggctgaggcaggggaatggcgtgaacccgggaggtggaggttgcagtgagccgagatcgcaccactgcactctagcctgggcgacagagctagacttcttctcaaaaaaaaaaaaaaaaaggaatctctttggttttatatatattttttttatatatataatatatattaaaatataatatatatatttatataatataatatataaatatattatatattatatattttatatattatatattatatatattatatattatatatttatatatttatatattatatatatttatatattatatatttatatatattatatatttatatataatatatattatatattatatattatatattatatattatatatttatatatattatatattatatatattatatattatatatttatatattatatatttatatatattatatattatatattatatatttatatattatatatttatatattatatatatttatatatattatatattatatattatatatgtatatattatatatgttatatattatatatatttatatatataatatattgtatatattatatatctaatatattatatatattatatatattatatattataatatatattatatattatatattatatatatttttatatatataatatgtataatatataatatatataaaaacatatataatatatattatatattatatatatattatatatattatatatattaaatatattttatatatattatatatatatacacatatatatatataaatgaggccaggctcggtggctcacacttgtaatcccagcactgtgggaggatcacttgaagccaggagtctgagactagcctgggcaacaaaacaagatcctgtctctacaaaaggaaactgtaaaaattagctgggcatgatggcatgtgtctgtagccctagctacttgggaggccgaagcaggaggatcgcttgagcccaggagttcaaggctacagtgagctatgattgtcccatagcactccagcctgggtaacacagcaaggccctgtctctaaactttttttttttaattctatttatatttacatgtatttaaatgtgaatattcactacctatttgttgcatgcctgcattttttatactgggcttgccaaaaacccgaacagctttctactttgacaatgtatcagaatttaaatcagcaatatgttaataagccaagcaaaggttatatatgcaaataaaactgttgtctataacctcctgttacactggggcacagcaaaagtcatggtgtagtcgcatgtgaacctgtccctttcatagctgctcattgccaggaaacatcaggaatagccatttggaagagtcatcagccctcccaccatccgttttctgtcttgtcttttccctatgagcaggggaaattccacgctggccccaatccccagtgcagcggctcagcctctgcctctgctgctggtccccatgaggccagcttagaaacggaggattttgcagaacatccctaaatccgcttgaataatgaagtgatcattcataaactcacctgaaccttattaaaacctatttaatatttttcctggataatcctatagggataacttgcctcctgggcttctctccaccgggttcagttcttcctttagtggtgaagttcctcccttcttagcatctcaactgtgcctgagaaaaggccagtggcggctgcactctgttccctgtggagtgttaataaagactgaataaattgaaataaatccctttcaatgtcattaagtgctataaataatcatgaaccaatgttcgatggctgatgagaaatgcaagaaaaaatttttaatcagtaggattcataagttgacaatctgggccaagttaaaaaaaataaaaataaaaagacttttaaaaagatcttatcgtttgttaccagtaagactgaattccagaagcaagctactccctcatttgtgggcccctgttatcactggctgcttagggttgccaagccctgaattcatttgtcaactaagagatttttggccaagattaagatttcccatgcctccatatttccatctgagaaatggagattatactgtcttccccctcagaatggatgataatgtggtctctcttctgttcgcatagtcatagaactgaaataaaacaacttaagagaattcctttgagcttctcagaagtgctgcagggctgggggatgcctcccaggagccgcagtcaggtgctgatctgaagtctttggtgggctgactttagcctgacctgaaatagtatagctgctgccacctggctcccttagcgtcagtcagacggtgcagctggttcctaggggtgagggctgagccagcagggtccgtgcccaggagggatgcatgggtggccacagcccagcctgcactgatcttgtctgtccccttctttggaaggaaggagccccaaaccagggtgcaagacagtgggtgggggtgccttgagcatgacctcaagtgatttccagcccctgccagtgctgacttctctggggaagggctgggacttccttctgggctcaagtcacgacccttggatggaatttcctgggagcttttctgttttttctggagttttcagttttttcctaaccagacagggacttggtacagaatctcatattctaattatgcctaggagcagcctctccccaccactcacagtgtttagcatgtgacaggaatcgattaaggcatgagtgattaaattaaagccaggcattgacttggatggtgtaatattctgacatctgtttggtgtcaaaggcacggggcaggcgcgttaattgaactgcttgcacctggcatttgaattgagccagagcggggctaaagtcagtttgccttcaccctgtaaatggagggtttctccggagcgtggatggtgggaggtatttcagggtgtatgcataacccccaccctgacaatggcccatctcttctccagcgtggccaggtttgagtgccagtcctgggtgtccagtggccccatagccttgcgttttagtaaaatgctgcccccattaccacctggtctgtgcacttcggtcactggaatttgccatcttccagtcccgaatgtggcaagccatggagccttaagctcttctccctccacatcctggaacagacccgccagtttcttccaggcattgcctcagtttgcccctctgtttccagtcacactctcaccagcgataaaatgattttagaccttatcatctcaccctcggatccttatggaaacaataatgagttgttccctgtttcaattccaaaattcatatccaatccgttttgcatgccattgccaaattcctcccagagcaaccccgtcacctgccctggccctctccaagtgtggtcctgccatgggcatcgcctgctaagccaagctggcctcgagctgcctgcccgggtccccacaccttggctcacctccctgcccagtcccgcctcctgccagcctgccctgtggctccttcatagatgccgtgctctttctgccccttgctcacccatggcagccttgcccctctctccctgccccaccccctatttaaattgacctgaccttcctcagtgtccatcttccccgaagctttccccagccttggcactcaaggtccagaggctacgcgtttcctctcacctgtggcagcgccgtgctccccagtgcctcacagtttccttcttgcccccgcttcctgtgtaggactcatctgcccacaggttgcacgtcctgtgagggcaaggactgtgtcttatgtgactttccttctccagtcacagagctgggcacatagatagctcaaaaccctctttattaacacagttggatgttgagaaatcaaacaggccaatgtcaaatgagctctccttatttaaatcaagtcagttctccacctcctagcactcagttccagtactctatatacatggaaataataaaaaacacatttcctttgaaacattctataatcgttcctttgccctacttcagaccaacttaacgcactccccattggtccaaatgagttttgctatacgaagatgctgataataatagcagcagtggattattctgctaaaaccattgcctcgttaatcctcagtcccgaggtggggattattatcctcattttgcagagaagcaaactgagactcagagatttcacagctggggagggagccagctcatccctctgtccaggcccaagctctctcccgcttgccttcctgcctctgcaacctcagagcatcccccatctggttctactgcctgtgctagtcgtgcaggagccaaaagacacgtctttagtgctaaggactggagaagccatgccctccagcctctgtgaatgggtcatatgtaacatgagcctggagaaattatttgaaaccaaaggcaagcctctaaaccaggctgctgcttcatggcgccggtgacggcagaaccaaatttagtgctgtgggcaggtccacacttatcaaatagagaagctcatttttcttccggctcacatcaagcatgaaaaatgttcacacataccccccacacacacatgctttccggaggggtccatgtggctagaggctggaagatgtggatgagaggagcctggcaggtaagcccagggaagatgacattcagcttcccagacagcatctacagggagaaatttaattaaaagtggggcggtttccctgagcaaggcagacaaagtcagccctctactgttaagaaaaagggtcacagtgagaggggaggtgaggagactgagtctgtattttctagtctgttgggctacactacctgatcccccttcctcaaaaatccactttactttccccatgtctacaccaatgtggttcacactctgggaccaggaaaagggggagtgatggggaacagagaagggaggagctcacacagctgaggctggggttatgcatatcgaattacttagaatttgcaacctcacagggtactttcatggcgttgaaatacacttcccacagccaccctccctctaactaaaagcaagagtcatttctcagttctggtcttgcctcccacgttctcctccacatttaagaaaatccaccagctacaaagtgaagataccatatgtgatatcccaccctagtttctgttttatcagggtttggagcaggtggagcaggcagagggatcatttcagcctataaattgtattaagggtgagtactgagtcattcttcaagaaaagttttagaagcatccaaaactgaagggtggagccacctggagacagtatcatcagtcctggccccgagcatggcctgcataggcccccatggatcccagcgggagctgcagagtgcgggcaccttggcacacagccctgagtgcaaaattaggagctgggcagagggcatctctctgtcgccattgggcagcccagggcacactggtcatagccttagaccacgaacaccctgtgcccgggggacagatgcaaccagtgtgccctgggctgcccaatggcaacagagagatcgacacctggaccccatgtcacggggactccactactaaggctcctaagactgccaccttccagtgggataagccctgcctcctactgggcccacaatgtgcagagaacacttgggactacctggctttctggatacacaaatattgatccaatctggactaattagaaggtcagtcccaataacaaatcgaagtcagctgggcgtgatggctcactcctataatcccagcactttgggaggctgaggtgggcagatcatttgaagccagaagttcaagaccagcctgggcaacatagcaaaaccctgtctctactaaaaatacaaataattaggctgggtgtggtggctcatgcctgtaatcccaacagtttgggaggctgaggcaggtggtcacctgaggtcaggagtttgagaccagcctggccaacagggtgaaaccccgtgtctactaaaaacataaaaattagccaagcatgatggcatgtgcctataatcctggctactagggaggctgagacaggagagaatcgcttgaatccaggaggtggttgcagtgagctgagatggtgccactgcactccagcctggttgacagagcaagactctgtctcaaaaaaaaaaaaaaaaaaaaaaaagccatgcctggtggagcactacgtgtaatctcagctatttgggaggctgaggcacgagaatcacttgaacctgggaggcagtggttgcagtgagctgagatcgcgccactgcactccagcctgggcgacagagtgagtgagactccatttcaaaaaaataataaatctgagtcactttaatattgttatttggatgtcaacctctaggtgtttgagacaggagagtgatatgggggcactggaaacacacaggcacggggtgtcctcacacttgggtagcccacacgatgtgatttcagggtgctgggaggtccccccactccccaaattactaacaagtggatagtactttacagtttatatgatctcatttgattcttaacatgagcctgtgagtgaaaaattccttcccctcttctacagattaggacgttgagattcagggaggttcagagggattcagggaagtcaagtggcacctggagtcccgtggctaatttgaggccggtaggggattcgaacccaggatttgtgcttcttatgcctgggcttctgctccctggggcatggtcttccccctagctttcccattcactgctttagcctaggggtcctaccctttattaaactgccagtgcctcactgcttttctcccccaaagacaaaaaaaaagtgtttttgcttttgttttgtttttcatgggcagagacctggaatttcagcttgagaatttgtgccatatgataaataaatcaacagatggctttttccttaaaaaaaaaaaaaaaaaaaactaagatgtatttgcagtgaggcataatttgtaccaaaaagtgctcaccacactgtagtcatgggggcaggaggcagccgcgggtgaagggagaaatcttggagtccaggcagcccccttctgggctgaactggggagctgggggtgctgccagccctgccaggttctcctaggaggcggcagctcatatggctgtgggaggaggcagagggagcctcatatgcacccacatttccagggatctagaagacagaaggaggaaaaccaccatcatgttaaagcagacagttaggtaacacatcctgtaatacaagttattttttccacatctaaaggctaaaaatagttgttagaatttaaagataattggtaaatgagtttctatccttctagtttcacatcaaatggaatcatgctgccttcacatcactagtgcccgttatttgtgtttaatttccacaatgttgtctaattccactctttgggcttccccagggatccagcctccctcactcgcccatcgcagggagatgctttattcatctttgtgtcttctgtgccgggcatagcgcatggcacagaataagcactcagtaattgattcacgagtgaataaatggatgagtgggtgagttcaatattgactacaaaaaccctaaggccacactggtgagtggctgcgcctgtagtcccagctgctggggaatctgaggcaggaggatctcttgagcccaggagtttgaaactagcctgggcgatatagcgagaacctgtctcaaatgacaaaaacagggccaggtgcagtggctcacgcctggaatcccagcactttaggaggccaagatgggaggatcacttgaggccaggagtccgagaccagcctgggcaacatagggagaccctgtctctacaaaaaattttttaaaaattagctgggcatggcggtgtgcgcttgtagtcccagctactcaggaggctgaggcaggaggatcacttgagcccaggaaattgaggctgcagcgagccatgatggcaccactgcactgcagcctgggcgtcagaacgagacctgctctcaaaaaaacaaacaaacaacaaaaaaaaaggctttcttaaagagacttgagaacagaaaggggaacagatacataacttatatatttatttgttcatctttccaccttcctggagggtggaggggaacaggtctgtatttggagttttgaatgctaaaagtgggaatacatgtactgtttgccatgatctgttcaaaagttaagccaaatgccttagattctcctgaaaactggaatgccactgtaaactataagccccacttcaaagataaaagatcttgatgaacagggctgggtctgtggactgggcctctccccaccacacaaggaagggtggtgccagttgaaggaaaatcacttaaatccttgctgtctcctaataaggtgtggtcccaggtagggctgtcagaattagcaaattaaaacacagggcatctgtgaaaattagaatttcagataacaacaaataattggcataggctgcataatgtccctcaaagatatcaggtcctaatctccagaacctgtaaatgtgatcttatttggaaaaggggtctttgtagatgtggttaaattaaggattttgagatggggggattatcctgtattatctaggtaggtcctaaatgcagtcacactcatccttgtaagaggaaggaagagagagatggaaaacacagaagagaagacaatgtggtgatggaggcagagattggagtgaggtggccacaagccaaggactgctggcagctaccagcagccagaaaagtccaggaaccaattctctcttggagctccagagggagtgtggccctgctgacaccttagcttcaacctagtgatcctgattttggactttggccttcagaagtgtgagggaatgaatatctgttgttttaagccaccaagtttatggtcatttcctacagcagccacaggaatcaaaaacagtaagtatgtcccatgcaatgtttgtgacacacaccaaaaatattacttgttgttcacctgaaattcaaatttaactgggtctcctgtattttatttggccaacctagttcccaggcccaaagaaagaggcttttgaaatttgcaagaaagctggttggagctgtcagaaagtggactttgtaaacacagtaccaccgaaccaatttgaactgtactacctctagacaaaagagagggcagtcagacagttgttcgtgatttcttctttcaacagtcatttgagcacttactacaaaacagaagctatgtgtaagggtggaggcgttagctgttaatcaggacctccaggctaagtttctgtattagtccgttttcacgctgctgataaagacatacccgagactggggaatttacaaaagaaagaggtttaattggacttacagttccaagtggctggggaagcctcacaatcatggcagaaggcaaggaggagcaagccacatcttacatggatggcagcagacagacagggagagagagcttgtgcaggggaactcctctttttaaaaccatcagatctcgttagacttattcactatcaagagaacagcacagaaaagacctgcccccatgattcagttacttcccaccagatccctcccacaacatgtgggaattcaagatgagatttgttaccatatcagttaccaacccttccagataaatcacgtgaaatatcgccattaacagagtgagctcaggtggttcttcagtgcatttctgatacctgaaccttccctgggaatttcacagaccatcaggctctccaccctttgatagcaggatagcagggcccaggttctgcaggaggagatgttaccacaggcctgaaagggagggaggggcagatgctacaggaagatgctggctctggattcgctggaggagctttcaagggaagtagatacacactgtctccatcatttcatgtccatcacactctaaaatgctttggacaagaagcaaatgttaaagacaaatgtggcccattttcctgtacaaagagggctgctcccatgccaggctattggcactggtgggcatgaggcttctctgctgccctggccggggggttctctcactcaccattggctctctgacacctggagagaccaccacccttgggctttcatgatgctcacagaatccacactgttggagctttaaggagcctggatcaactggaacaggcagggagtactaggacagcccagcattgccccaaaatatccaggcctgataaaagagaaaaacaggtagctcacaggaaaaggataaaaaaaggaggagggatttaacatgaaaaggtgcttgatctccctcataataaaaagactgctgattccatccaggcaagtgacagaaaaaaaaaaattaatttaaaaagactgctgataaaaccacagcgagacactgctgctcagggatctgagggtgtgggcagccaggctgccacgcatcatgggtcggagaggaagaccacacccctggagcagagggcggctgatctgtcagatgccctttgacagcacctcagcttccaagaattaaccctttctatgtgagcagaggcatccatggggggacacactggtgaatcatctgttatgtagaagtctggaaaacatcaggatggaactggtgaaataagtgtggcctctgacggaatggagcggtccgtctgcactgctgcgggtgcccctcagatcctgtgggtcagtgagaaaagcagtgaggaacaaggcaggtactgtgtactgtcctctgcgtgcaaggaaggccagcgcatgcaacagagtccacacagacatagcctaactctggaaggaagaatgagaatgcagtttcagtggtggcctctggtggggagaaactgggtgaagggagatgtcatttccatttctctactattaattttgtattaccatgcttaaatgttactttttacctttttttttttttttgagacagggtctctctctgttgcccaggcaggagtgcagtggtacaatcatggttcactgcagcctgaacctcccaggctcaagcaatcctcccacctcagcctcctgagtagctgggactataggcacgcataccaccgtgcccagctattttttttaatcaagatggagtttttctatgttgcccaggctggtctcaagctcctggactcaagcaatcctcctgcctcagcctcccaaagggctgagattaaaacgtgagtcaccctgcccagccaattgctttttaaaaaagattaaatgcatgtatacgctcaggcatcagcacacttggaaaggatgaaaatatccggaagaagggttcttttaaaaggctcctcaagtgatgctggcaggcatgacgaatgtccctggtcacaaaagctctgatctggcctaaccctgtcatgttagagactggagtgcgtgtgtgtgcgcgcaaagtgtggggggatgggggtgagtgtgtgtggtgtgtaagcatgagtgtgtatgtgtgtggtgtgggggtgtgtgctgtgtgagcgtgtgtgagtctgtgtgtgtagtgtgtgtgtgaagtatgtggtgtgtatgtgtgacgtgaggtgtgtgtggtgtgtgagttgtgtatggtgtgtgcatgagcatgtgtgtgggcatgtgatgtgtgtgtggtgtgtaagcatgtgtgagtgtgtatgtttgagcatgtgtggtgtgttgtgatatgtgtgtggtgtgtgagcatgtgtgtgtgatgtgtctgtgtgtggtgtgtgtgagcatgtgtgttgtgtgtgtggtgcatgtgtgtggcgtgtgagcgtgtgtgtgcattgtgtctgtgagcatgtgtgagtgtgtgtgtgttcagcatatataaggcatgtaactgaacacagcactttagagggctctcctggagtcagagggggtgggtaggaggagaagggaggtgggctagtgtgctgaagtatctactccttgtcatagtctgtgacaacccagactagcccatgagccaccctgttccctgcatttccaatgagacctcggtggacatgttccctgaggtgaggctgactgatgtcatttgacgatcttgatgccaaatccttttatatcaaaaacaaccagaacactctcttttctcttagtgctttcacccagatgaccacatttcatcctcccagccactctgggccaggtggcactgctggtttgaaagggaggtctcccctggagtaacttccgtgggcggattcacaccctgcccacagtcctgtcccagtcagcccaccatggtggtctccggttcctccagaattcccgcttttcagctcatccccacattcccggagggactgagagcgcagccccagggccctgctctttgggggccgtctctacacccagagaagcagcaaggcattcctaggtttctctttcagatgcagaacttcagtgttcagagatgttcccactggtcctgagagggctcagttcagctttaatgactgcgctgttgcgtgtgctctgcagagggcgggtggcccagcgtggctgactgcagttttcctgacgtggagcccgagcctgccccgctgtttattaattaaggatcactctgcttgcagaaccctgaactccccagaactgtgaggtgggagaaccccgagaggccacctggccccacttcccacctgctgcccaaaccccctctctgccttcctgacagtcaccccaactcccagtgatccccatcaaccatctgacaaggggactgagagggaagagaaaggaggggcccaaagaggaaggtaaaactgtcgggaacagcccccaaatgtgtgacagccttcagtggagttgcccactttcccttttctcctccctgcaggacctcccttctccccagtcctccccaacttctgaggttacattgagaaaagtctgcagagaggtgccagcatcacaaggtgttaaggaccacgagtttggcattttaacagatgccagagccacttgagaaatgtggtaactaagcccagagaggtacagttaacctccccagagtcacacagcaggttcatggcaaagctggactagcacaggtgtccttcccctgcagatccccttctgtgccccacatcacctccctccagtgtctgggccacctggagatgggccctcagactcacccggccagaggtgccatctcatgggagaggtctggccaggaagcatcgatatttgagatcccaagaaatgaagacttggcctgtcagatgacagacttcggtcatgggaacacgtgatctgttttacacatgcgtcccctcagcagcagctttccagaacattcccactttcttctgtagtgagaagaactctttccctgcagcctcctgcccaactcctccttcagtgtctttgcttcagtgtctttgataaaccattctgctttgcagagtgcgagctctgccttgcagggttcgcatctgcctgtgctgagtaaccaacgctaaggtcgagtggtcggtcacctctcataagagctagggttgtctcatgctgatgactaggacttgccctcaaggagaaaaataaatcaaaacaaaagcaaaaacagcaaacatgcatctcttaaagaaggctctgagtccaggtaaatttccttccactgaagcagccaggctgaattcgaattatctttgcccctgcttaaaaactaatgcaaattttcctagagaatatccactaattcctggagggggcatgggcattcctgatgcccatgagaggaccatttgctcttccctcagtatgctaaataacagaagcgacatttgttgctggaaagtatcagtgaagttaataaggtttttcttgcccagggtgagggaacagttcccaatgacaaatgctgtatgggaaggggctgtagaactgccagcccctttggtccatccgtaaagtgaactctgtggatcctggaggattccagcgtctttttttttttttctttttttttaagacagagccttgctgtcacccaggctggagtgcagtggcacgatctcagttcactgcaacctccgcctcccgggttcaagcgattctcatgtctcggcctcccgagcagcaagactacaggtgcgcaccaccatgcccgactaatttttgtattattagtagagacgggggtttcactctgttggccaggctggtctcaaactcctgacctcaggtgatccacccgcctcagcctcccaaagtgctgggattacaggcatgagccaccatgcccagccagcatctttcatttttctgtctgctttggccctttcctctctcactgtcttccttttccatttccaaagtcagtccatctcactattagcacaaaaactgctagagcgcttgtcattggtcatctctccctgcacctggctggtctgttcttggccactgaagcgtttcccccagctgttgctttaatcattttattgttattatgccttacttaagaaatggatatgagatgcatttacctgtctcttcctgccactctgcagagccagtaagatgtggtggaaagggcccaggctttggaggagggctggctggggttggatcttggctgccccctactagctgtgtgaccttgggtaagtagctggacctctctgagcctggttcggaatcatagcacctctctttcagggctgctgtaaggaatagcagtggtgtgtataaagcagagcgcacagccagcaactggcccctagccacactgctgagcacctactgtgataagctgccattgtggtgtgtgaagcaaaggggaaacatgcctgctgtagtgagcttcctgtagggcaggttgtagaaccagaggtgggttccaaggttacaaagggactcttagtgtattagtctgttctcacattactataaagacctacctgagactggatcatttataaagaaaagaggtttaattggctcacattggctgggtgcggtggctcacgcctgtaatcccagcattttgggaggccaaggccggcggatcacttgaggtcaggaatttgagaccagcctggccaacatggtgaaaccctgtctcttctaaaataaaatacaaaaattagctggccatggtggtgtgcgcctggaatcccagctactcaggaggctgaggtggaagaattgcttgagcccgggaggtggaggttgcagtgagccaagatcgccccactgcactctagcctgggcagcagactgagactctgtctcaataaaaaaaaaaaaaaagaaaagaaaaagaattgcaagaaataaattattgtttatgagctatatggtctgtggtaccttgttgtgggactgggagtcttggcgtctccctgaccctgcctgttgctgcagcaccgctcagccctgcctgctccctacctgcctcccctcggcctctcctgcctccaccgggcccctggtgcctcctctagagacagtcctcctgggaccgattgtgttctcacttacacgaggcatccaggactacagataaccagaggaaggggcgccccccccgcctgccctcctccctggcatcctcacgctgcagaggtcagagcctcatcccagccccttacctgcccctactctgtggagaaccgtggtcagttcgccaggccggatccacgaacggccttgtggaagatggtgagctcacacccagagctggctccgatgaccctgtctcctttacatgtttctaccttcccctccctaccttcccccactgctgggcgcagagtggaggcagatgaggtttaaagctcagaagggcttaaacgggttggggcgcagtggctcatgcctgtaatcccggcactttgggaggccaaggcagaggatcacttgagcccaggagttcgagaccaacctgagcaacatagtgagaccgcgtctctacaaaaaataaaataaataaaattagctttgcagggtggcatgcacctgcagtccctgctactcagaaggctgaggtgggaggatcgcttgtgcccaggagtttgaggctgcagtgagctatgctggcaccacagcactccagcctgagtaacagaatgagatcctgtctcaaaacaaacaaacaaacaaacaaaagaaggcttaaagggggctccaggtgggcttggcagcacaaagctatgaagttctatcttagacacaagttctgttactgggcctttgcaggctggcctgggtacctggctgccatagacagggaaccttccagatgagctgcaggcgtggagcacaggagccagggtgctcttcctgggctctgtccacaggcagaacgtacacagtctttgtacacgtccggcggctctggtgcctatttttgtttgtgtttttcttttgtttggggggatggatttggtttcccccgagccctctgtcctcctgtcacctggctggtgctcggcaatgttgaccagctgcctggctggagttggcagtggctaaggctgtgacagctaacatgttcctgagtcctctcatttcttcaccataatgccctgttgagtttgcagatactgtctctgtttttatctcccggggaaactgaggctcagagtggctaggccaccttcccatggtccctcagctcatgagggccacacagggcattgcggtggccttctcctcagccttgaccctccggccccagcattgctgcctcaaggggtctcctctgctgagccgtgcaccttctgcctggcagctccaactctgtggctgtgttcagtggctcagcactgccccttgaccctccctggccttctgcggatgccagactggagcactctgacaaggtctggggtggttgtatgggtcctgtgacctctatacacctcccagtgcctgggaatcctgcagatacaccctccttagccgtccctaaccatagaggacatttctgaggtccccgagagagtggggcacccctgcaggatccaactgctgggcccaggaaggatagcagcagcatgaggggttccattagccacaaactcacggcatggaaccttcacccacctcgcccctcatctgctgtttagcacctggcacgccgtgtatacttactgattattacattttaatggcaaattatagtggcaaacgtatgcatctttgcacaattgttgtacagcatgatgaacaagtcattaatagtaaagaataaatgtgaaagtgagaaaaatctgactgccaaagtttttactccttccttccctccccagacttttaaatgaaagtttagggataatcccttagttgtcctgctagtaggacttgcaattaaaagaattgggccaagaacacttctacgcttctccttttaggtttgggtgtaaattcggggtatttctcactgatgaaagcctggtgcagggcagaccgtgggaagctttcatttccggaatggaccatcaacatcccttggagaagaattctcttctccagacccagacctggtgtcctggcacccattgggcaagtgggtcctagaagacaaacctggtcagagcctggaggctgcttagcattccccacgcacattagcagctcggagagctcaggaagccgcagcccctccttgcctcaccagcctggatcaggacagcatcccctggaagacacacagggcctggcctctgattacccagcctggagggaaagctcaatcgagcatcatgtcacccggtgcccccatgcagggtggcactggtgagacccccaagccaatgataccacctcacaggagtgcaggcccattgtggccagatcatcttgacttttcaagataaatcagaaatcgtatttccatgagatatccctatttgcaagtgatggtgactaaattagaagtttttgaatattgtaacatgttcgtaggctgtttgtctggtttaaactctatctggaggaattcaagctagacttcaggaataacttcttgaggcaaggattttgagaccttagggaaagaaggacgtcttgggggtattctgactgttgtcctcctggaagggaagaacagagaactagaagactgcccttagcgaagttcaaagcacctaagcccgggaccctcagcaagtgttcttgagtcacagattctccctgaggcgcctctttctggctccatagaatggctgattctgtaactcggtgagtttgctttttttttttcctccatcacccaggctggagtgcagtgaagctggagtgccgtggagcgatcactgcaacctctgtctcccaggttcaagcaattctccttcctcagcctcccaagtagctgggattacaagcatgcagcaccacacctggctaatttttgtgtttttaatagagacggcccgaagtgctaggattacaggcatgagccaccgcggccagccataactctgtgactcttgttacaaaggccttatattttgctctttgagggtggttttggtttgatgcctgttggttgccatcttttaactagggatgttttatcaaaatgcccagccaaagtgtccaaacaaattataccttaaagtttgaaaatgtctggcacttctaattcaatgcctgttgtgccaggcactgggctgctgaggaactgagtcccgtccctgcaggctagctagagaacacacacacacacacacacacacacacacacagagtggtcttacaagtcagttttatattctacctatatgcaataaaggtattattatgttgaggtgccttgatataaaaatttttcttaaaggagaggatgcctaaaacaggcattacctgaaacctcctctctccagcattggttgtcttctgtcatgactcagggttttcactgagaatgggatggaaatgtggtctaaagatagggccaatgttgggactggatcccctctgggaagtcagaccaggctagggcaggtccttgaagccatcaggaaaagcctctggagccagaaacaaaacaaaaaaaaaatggtgttaactaaactcagtctcaaatcctgaataggactcaagtcaagcaaaataattaaaggagttagcaaagggcaagtcagagagaccgagcaacaccaatgtcttccgggagccctgtggcgagtgacagagcctggactctggagtagaactcatcttgtgtcttcttctgccactcgttagctgggtgaccttgagccaagccccttaacctcttggaccctatgttcttatctctaagtaggggctggtaatatcttcccctttgaggaatgccctctaaggggtgttgtgaagattcggtaaggtggcaggggtaggactcctggccagaaacaggcacataataaatgctaagtctctccttctctccacctgctggatgctgtagatactaaggatttcgatgtgaatgagacaaaacccctgccttccaggagcctttgagaatcagagaactagacccatttccagaacaaggggatgcagggtctggataaagttttggggatcaatagagcagagggctcccagaggatcccatagggttgactcctaactcaagggcatgagacaacccccaggaagggcaccctggaaggggtccggctgtccctgatttacttgtgggcactgggggaatgcccggagccatccagccctcagggctctgtgtgattctgggttcctcccataaaagataatcagattctttcacgttaatgtctttctccacctcattgcacatcatgcagctattcattgactcagcaagtatcagctttgcatgcgaccttggcctacccactttagcttttagtaatagctcccttcttgaataatacaaccagtggggaaacagaacctaactcttacctctgggaggcttatttgctttgagaacatatgtcctgcagttttgttcatatggcagtgaagtttcgtgcacacactctagagccaggcagcctgggttcaaagcgcagctctgccaggtcctaactgcatgaatttgggcaagtcgctcaacctctccatgcctgagtttcctcatctgtaagattggagcaatggtaatacctgctttttagggttgagaagagaattaaatgaattaagatgggtaaagtgcttagagtggagctttgcaagtagtaagtgctatgtaagtgttcgatttaaaatgaaagacccttaaatacattctttgttcatttcacaagcccttcatttcacaaccttacatttcacaaccaagctctgtctcccctggaatccagccataactctgctcacaagtgtgagacaggccccagcagagctgcacgaagaggagagaaggcagccccccagactcccaaccccctgtccaagatggcaaaaccagaacacagcctctgtaccaccccagcaggtattcagaatctgcaatctccaaagcccacttcaattgtaaatgtagagccacgtgcgctttaagtcacctgtcactctggaggctcttttgctcagttcctcaccattagcagggatgacagggagtgcaggagtgcggtcgactcccagatattggagagcgctgggctagctgcccattctcccggcctccactcctctttgctgtccagccatcacttgctctttgaaggcaaacaaaacagaaaacagtgccaaaagtatgggaagaaagccagcttctcccctggggtgcctgtgatgccatgcccaccctccctgaccacgcagcccctgtggaccctcagggccccaagcccccatttccatcacatgcgtacacccatgtgtgtccatagccgcccatctcagtcaataaggctgctcctgcccacttggaatagtggtgacaaccaggagtggcttatgggaactatcccaatggcctgacagcatgtccgctgcaaaccgctgaggtaggacactgccctcatgtctagctgatcagcaagaggcgcagttgctttcttaggtaacattgctgctgtgtcctggccattgctggggggtggcacttaatctacaccagaattttccctcctgtatcttccaagctgcttggatcttggtgctgaattaggttggactttgtcttgtggggaagggaggactatagaccctcaacgtaagcaatggtcagactattctaagaaaactcgccgaattaaagcatgaggtaaatttagttctgacttctgtccaccccactgccactgtccccttttatcccatgatcccttgcttttcttttcctcctctctccctatctcttgtgtttgacgcatgataggaattcagaaatatatgtttgtggatttgtttattcacgtagcaaaccatttcttgagtgcctaccatgggccaggtagaatgggcggccccgggctgcagtggtttcttcagcccctctccagggtttacactgtgcaagacggtttgtgatgggtcctcccatcgaggaccacactcttctttctctgtgccccttggtcctcagtctctgaccccacttcaaaggcagcattcactcagggaagctcccatacaatgctagtcagagtaaaagtttggacaaattgccaggaagcagcttgtcagtatgcataaacagcctttaaaatattactactctttgacccagaatttcacttctaggaatctgtcctaaggaagtagtcacatgcaaaagatttatgtaccaagatgttcatcaaagtgttgttttataacaggaagtctcagaagctggataaatatccaacctctggaaatggttagatagaatagtatgtagccattagaaaattatgtctatggggtttaaaatgtcatgggaaaacacttctgacataaaagagcatgagaactgtatatttagcataatcttaactatgttttagaatgcacaggaaaaaaatgtacaaacatattcatagtgatgtctctggtggtaggattatgatcagtaagtacttctgtctcttcatattttcctgtatttgataatacatgcatatgttgtttttaaaataagaaaaattttaagtttaaaattggagctgaaaagtgtttttaggtcaggcgaggtggctcacacctgtaatagcaccactttgggaggctgaggcagtcagatcacttgagcccaggagttcgagaccagcctggccaacatggtgaaaccccatctctactaaaaataaaaaaattagccatgtgtggtggcacacatctgtaatcccagctacttgggaggctgaggcatgagaattgcttgaacccaggaggtggaggttgcagtgagccaagatcgtgccactgcactctagtctgggcaacagagtaagactctatgtcaaagaaaaaaaaaaaagaaaagcctttttaaacagtagcagacataactatataatccttactaagctgtcggtcaaatttttatttatatatttattttattcatttattatttttagacagggtctcactctgttgcccaggctggagtacagtggcgtgatcatggctctcttcaaacttgacctcccgggctcaagtgatcctcccatcttagcctcccaagtagatgggaccacaggtgcataccaccacacctggctaattttttttattttttatttttagagatggtgtttactatgttgcccaggctagtctcaaactcctgggctcaagctatcctcccacctcggcctcccgaagtgctggggttaccagcatgagccactgtacccagccctcaaatttttaaaaatctataagagacattattggacaattagagaaattcacatatggacttataatagtatcagagtgtgtggtgtgatggttctggagggaatggactttttctttggagacaggcttttctatgcccacccttttatcttgctaacttatcatcatccaggttccagcagaaacattacttcccccaggaaatttcttaagggtgcagtatcatgatgtctgcagcaaattctcaaatagctcaggaaaaaagtacgtgtgtggtatgagtgtgtgtatgtatgtgtgtatatatatacacatatatacacatatatatacatatatgtgtatatatatacatatatgtgtatatatatacacacacatacacatatatatacacacacacatacatacatgtatttttatataattatatatgcagagagtgcaaatgttgccaagttaaagattggtgagtctaggtgaagggaatatggtatttattgtattatttgtgcaacttttcttaagtttgaaaattttcaaaacaaaaaattggaggaagaaggcatgccagtctaccccaagccctccattggaatgctgaaaatctaaacaatgtgatttggcaatttcatttcttttctgttgtgggccagtagtccttagatgttggggaagggggtagtcgctgaggtgtggttgacttaggatggaagaagcagaagtcaagactcccagggtcaaagtggtttgctctgctgacccaagtgtgggaggcccagagtcagcgtttcaggtgtgctaattcagcatggttctattcacggccaaagtccaccctgggcacctctctggcagcaatcttgggtgactctactaaggccaggcctccatgaccctatgtctggatcccatatctccacctctcccactgtctcaggaacggtgcttagctttttcttttccctctcctgtcttctttgccagcatgtagaaagtttaaataattcccctctttacaacaaaacaaaacatacccccttcagtcaaccaccctagctctcttctccttttcccagccagatttttttaaaagcatcctaggccaggcgcggtgactcacgcctgtaattccagcactttgggaggccaaggtgggtggatcacaaggtcaggagatcgagaccatcctggctaacatggtgaaaccccatctctactaaaaatacaaaaaagtagccgggagtggtggcaggtgcctgtagtcccagctactcgggaggctgaggcaggagaatggcgtgaacctggtaggcggaggttgcagtgagccgagatggcgccactgcactccagcctgggtgacagagtgagactccgtctcaggaaaaaaaaaaaaaaaaaaaaaaaaagcatcctcagcactttggcaactccatctcctcccaacatgtccctgttactggaatccagccaggactcagccccgatctttctactctaaccagttgtctcagttaacaaggacaggtttatgctgcagtgacaaacaagatcccaaattcttgtggcttcacacatctggcaccacctcatcttccagccttaggagtcatcttttagttccttgaaaactctttacagttttctgttggggccttgtcatatactattcccctggaatgttctttcctatcccctccctttcaccttgctaacttgtgcccatccttcaggtctcagcagaaacatcacttccttggggaagttttctccaacacccacactacacaggtgtcccatctacactcctatgactttgtggtacttgtctcacttcattttccactgccttccccacaaggcacctgcacaagggcaaggaccgtaccactgtacctatgtcactcattgctgtggtcacctgcactctggctgcctaccttaactacacattagaatcacctgaggagcttttaaagccacaatgcaagactccaccctaggccaattggatccaaatccctggggtagggccagacatcagtggagttatatatacatatatatattttgtttgtttgtttgtttgttttttgagacagagttttgctctgtcacccaggctggagtgcagtggcgcgatcttggctcactgcaagctccgcctctcgggttcacaccattctcctgcctcagcctcctgagtggctggaactacaagtgctcgccaccacgcccagctaatttttttgtgtttttagtagagatggggtttcaccgtgttagccaggatggtctcgatctcctgacctcatgatctgcctgcctcatcagcctcccagagtgctgggattacaggcatgagccactgcacccggccatcagtggatatatttttaaagcactgcagagaattctgttgcatcagcttgagaaccactgatctgccttgtgcttcacatttaaaacttttttttaatgaataaataaaccccaaaaaattaatctccctaagcctccctagaagataggatggtaaggatattttcctaggtaaaaatatgttaatttcatatttcatgaaatttcatgtttcatttcaatcaagctctgtcatacaccttacatggggcaagcccagtgcctgggcagggtgtaattatactcattacacaggcaaggaaaagtcacattaggtgatggagcacaaataggcagttaatggtttcagggctagttaggatatgtttgtctttcaattgcaagtaatagaagcccaaagaaattggttatttatataatataattgattggttcccaaatttgaaaaattcaggaatagacccagcttaggtacagctggatccagtcactcaaacaatgtcacaaagaaccctttgacaggaatgtatcctgtgttgactctactttgctctgagtagtctttccccaggtgatgataaaaatggtcatcatcgccaggcttgtgtcctgtttagtaggaatatacaagaagagctcagtaaatgctggccccaccactaagcaaaaacaaaacttttgttgttgttattgttgttttaaataacagcttagacctttcttctttccttgttattctctttcatctgtaatccagttttctacttctgaagtatagaatgttctgatgatttattcttcattacccacaacttgcacatgtttatttaaaaatgccaggattgcctggccgttgtgtgctgttaacctttgtttgctgttagtggatccctgaagttcaggctcccaggggagcagataatgggtatccagttcctgcaatatccaccctctggcaagccaagttccttcctgggtaaggttttgcctacctgcattcctagggaagtttctgggcctgaccaccaagccagctctgagaaggggtgcataagccccaccatgctttggctctgtccctatagaatattttatgttgttactgaaaactaaaggaagatgggtgcggtggctcatgcctgtaatcccagcactttgggaggccaagacagattgatcactcgatgccaggagttcaagaccagcctggccaacatggtgaaaccttgtctctacaaaaacaaaacaaaacaaaaattagccgggtatggtggcatgcacctgtggtaccagctactcaagaggctgaggcacaagaatctcttgaacctgggaggtagaggttgcagtgagccgagatcgcactactgcattccagcctgggtgacagagcaagattctgtctccaaaaaaaaaaaaaaaaagaaaaggaaagctaaaggagagagactaaaatgatatcaggttcctggagaacaaacagacatgattttgcttcatggcaggacagccggaagaagtgggattatatcctcacattacaaataagaaaactgagactcagaatggttaagtcacttgtcccaggccacacagccagtaaattacagaaacagaatttgaacccaaatcttccagctccaaagcttgtgttcttttcactacctcctgcttaattttttaatttctaagattagacccttcatctatccatgacacctgcctgtcatcccctgaaaaaaggtgaacgccgttcagaaatttttctagcctgagctcactcccagttcacttatttttgctttgtcatggctgcccagtccccacttgtagaccaggaataggtcatggctgcggggactacacgctgtcgctgctgcaagggccggcctctgtttccggggctgagtgggggccagacctgccaggagcaccatcttctgtgggtcctgcctggatgtcacatcccggccccaagaagtcactgcaaaccttcgtattattgagcttcacatcctagaatttgctgtcactgtggctgctgcatgaagttgtcctgagagaaacgggcattgtcattaacagggaaattgatggtctgggggaaaagtcatcctcattctcttgcagatctatgggtgattgagactggctgatgttgaaggggtttctcagccatcgtgtgccatgttatggaacagtggtgtagccagccatttgacacccagcgctgacctttgtttaacaacctcacctatatatgacaaaatgattgtcagaaataatcgtgtaatgaaatgactgtaataatggccagaaaagaaacgcagatagtaaaatgtttctcttgttgaactctgtacatataattgcaccaggatttttttcaaataaaaagtaaatattatactacaaaaaagggaaaaagcacaagcatttattaaatagctttctatatctttctgagttttgatcctttgattgcagactgatgtaatattttatgtaaatcattgcttggttactaagtgaactttaagaaaagtgagacgtctgcagaagttgcccataatttagcagctactgtattgtaccattgatgtacggctttattttcttgattaattatttaaacaatataattcacaattttaaaataataaatttccacttaaaatggtatttaaactcagcaaaatatatcatctatgagtaaaatttgtatttaccaagcaaaaatattacagtttgtggttcacatgctgtctcactgttttaaattttaaatacaaaaactccaagtaggctgggtgtggtggctcacacctgtaatcccagtactttgggaggctgaggcaggcatatcgcttgagttcaggagttcaagatttgcctgggcaacatagtgagatcctgtctctactgaaaacaattagctgggtgtggtggcacatgcctgcggtcccagctactcaggaggctgagataggaggatcacttgaaccctgggggacagaggttgcagtgaggcaagattgcaccactgcactccagcctgggtgacagattgagaccctgtctcaaaaaaagaaaaaaaaaaaagaaacacaaaaactccaggtggtcgcacagaatgacaggactgaagtaacttagctccaatttctgtcttcataatcactgtcctaccattgtctgtgcttagaatctacttgcttaatgcaggaacatgtgttctcacagagatggaaaatgcaaatggcgccagaagcaagctggaaattctgaaccattaagaatttactctctgccaggcacggtggctcacgcctgtaatcccaggactttgggaggctgaggcaggcagatcatctgaggtcaggagttcaagaccagcctggccaacatggtgaaacttcatctctacaaaaatacaaaaattagccaggcatgatggtgggtgcctgtaatcccagctactcgggaggctgaggcaggagaatcgcttgcacctgagaggtggaggttgcagtgagccgagatctatctgcaccattgcacttcagcctgggagacagagtaagactccatctcaaaaaaaaaaaaaaaaaaaaagaacttactctcaaaataaatacgtgtggctgactccacatatggtagggccaactgtataactagaagttctccaaataacttctgtggagaaaaaaaagtttattaaaggttaacttttttaaagtgctaactagaaccttactaacactgagatcgcaccaattgtttataacttagacagggccgggtgcagtggctcatgcctataatcccaacactttgggaggccgaggcaggtggatcacttgatgtcaggagttcgagaccagcctaaccaacatgatgaaaccccatctctactaaaaatacaaaaattagccaggcacggtggtacacgcctgtaatcccagctactggggagggtgaggcaggagaatctcttgaacccaggaggcggagattgcagtgggccaagatcgcaccattgcactctagccccagcaacaagagtgaaactctgtttcaaacaaacaaacaaaaaaaaaaacctcttggaccaggaaaatattttttaagggaggagtattttatcactggcattgtttaggattgcaggcacatgatgctaatgaaaagcagactaactattagttggttttattactgtttttgaactctctctctcccttttttttttttttgagacagagtctctctctctgtcacccaggctggaatgcagtgactgcagtctcagctcactacatcctctgcctcctcagttcaagtgattctcgtgcctcagcctcccgagtagctgggattacagggcaccacaccaggctaagtttttgtatttttagtagaggcagggtttcaccatgttgcccaggctggtctcaaactcctggcctcaagcgatctgcccatcttgacctcccaaagtgttgggattacaggcgtgagccaccgtgcctagccctgtttttgaactctctagagacagtccagccccttattacttgtcctgaggcagctgctcccttcacctggccccccgcattgtgttccggacccttgtcctggtggtgctaaagaatatctctgtcgatcctttggggactggggaaactgaggcccagtgccacgcgatgccatttgttcagggaagattaggtcatctgctaggtccccagtcacttgaccttcttcccagacaggaagaagctgctctgggtctctcagtgctccacgtgtctttgcacattgaaatgttttctgattttttttttttttttttgctgttacatttacttttaaaaaataacaagcaataaaatgttacatttgagaaggttgaaatgagaattgatttgagttaaattctagcagatttttcttagaagaatgatatcatcatctccagctacctgcaattgatctactctgaattaagaaagagacttccatttgttgtttatattttgcactcttgatgtgtttctttaaattatggtcatgggccaggtgtaggagctcacacctgtaatcccagcaccttgggactctgaggagggaggatcactggaggccaggagttcaagacctcgtctgtacagtaaattttaaaaattagccaggcatggtagcattcacctgtagtcttagctacttgggaggctgagatgggaggattgcttgagccagaactttgaggctacagtgagttattttcacgccactgccctctagcctggctgacagagcaagacctgcctcaaaaaaataagtaaaaaataaattaaatttcaatcattagcagtcattaggatatttaaatacagtatgttgaatcaaagttacgcatgtgtgtatttttttttccagagagttgtttatcatgtgggttttaatttaactttaaaaaaatgttggctggacagttgcccaaatggtatcatcagccatttggttgagaacgtatgtcctgcgggctcctctgtcactggagttttgctagctgacagccactggctagttagagactgcagtcagcacagatgcaggcgtggacttgcgcacgtaaccatgtcaatgcaaagccatcacttcttaaaaattctgaaccctgctgtctgagatggtggtgcagcggatagaactctgctctaagaggcagtagctaattccatgtcttctttgcccttgactagctgagtgactttgcacatggggcttgcctctctgttgccttgtctgcaaagtggaatcatcttttccttgctagacagaaggtggaccctggacctatggcctttttgagtttcccccccgcttcttagaaggacctctgatcctactgagtttaatacccacgggttaataattgggaaaagcaaaggaagcgcttctgtttaggtaattatatgcatgtttttgtctttttctggctggaaagatatccaagccactgggaaggtccgtggctacccagggtagccctctctggggagggctgctatatccaagagcccctcatgagaatttgaaaatcgaccatggtagggcctgctgacttttgacagctaatggtgtgctgagaattgtccctccaaagatgcctttccattccctcgggagagtctgggcagcccctactgggggctgggatgctggctcttccctcagcctccaccccaactgctctcttccctcctcccctccccagccccctaatttctctcacaaggctttgttctgcagcaacctttcctaatgcagtcctggcctcttcgcagcttcattacataaccttccgtggactcctggtccaaggatcaccccagaaagccagtcagaggtaggcacgcagctggggtccatttacttaccttccccaccccctcggaactcagaggtggtgcaggaatttggactccaagaattaacagctccaccaccatcaccagagccaaaactcaggatgcatgtgcttcatctgctgcttatttccagctgagagccagtggtgccatggttccttagggagccggtcccctgatgccggctcctggccccaaatctctctgatccgggctcttccagaatgtcttgtctccaccatcgcctttgaccaatggtgtccctttgcctggtaatgtcccctttgcctgatgatggccctgtcactcctctctttagcacagaggaggctgtttcatcccttcaagcctgccctcccttcaagtcttagctcaagttcaccttctccgcagagccttctccaatcttcttgactacgtctcctctcagctccagcaacctctgtctctggcactgattccttacttagctaagagaatcacagacacttggggctcaggacaatctgctttctctcttcttacccatggccttggactgtgtgtacctctttgtctccactcccaaacccaacccccagagggcagagagcatgttgtctgtccctttgctcagcatgaagccatgcgtgtggtagatcggcagagttccataacttgtgttgaccgaggggtcactttgctctgaaattacccctgtgtccttcagtatttgcacagatagcttcctggccagaccgaatatatccaagggcatggcccacctctgctcctgtttccaggtccctggtgggggttagttcatgccttcctcataatctgcccactggcctggtcctcaaggtcttcccaactgctcagccagagttgagaaaatgggtcgctccatcctgtttgtgtcgttctctccttcctggcccactctcctgcccacaggtatccaggggctgcctgtagcattagaggacatacatgcacatgcgtgggcatgggacactcacgtagcctccaagcacagcatcaataatgcattctgtgctttatagcatggaaagctgctctaaactttattacacagtggacatgtctgaagcagctcccaaatccacccctgagtgtgttggaattggcaagcctatcacttgggagtctagtttttttgttcgttaataatagatgcttcctgtggccccagcttggcaattttgatttaaagtgatcttaactgaagagactaatggacgggtctgaatttgtgccttttaagcacaaagtattgctcttaattaactggattctatcctttgagcaggcagaggccttcccccaagggcgtcattaacgatccacatctggacatcttccaaagccttcttctgtttcaggccaaccgcaggtgtgttcctgaacacccaggaggctatgagagccacatatgcctcccaaatacacacagtgtgcatgcccagggacatagagcagtgtgcaaagtcccattccatctctctccacctgggagaggatggctcttctgtctgattcatggctcaaagtggtaaaggagctccccactccccgtcccacgcctactcagagtctgcaaatatgtatgcgatatgagagctcgtcagttagctgtcttcagtgtggcgcacatttgaggagtctgactcccctccagcacaggccaatgtgcactgctctcctatctttgtacccccactgttgcactgtgcagaggttggagccatagaagtaccagagctgtgaaaggagaggccccctctcacctctgccctggtctccatccccactttctctaggaagctagtaggtgctgacaggggagagaagggaggggaggggtccagaaacagtggctcatgcctgcaatcctagcactttgggaggctgaggcaggaggatcatttgaggtcaggagtttgagaccagcctgggcaatgtagcaagaccctatctctacaaaaagaaaaaatgtaattagctgggtgtggtggtgggcacctgtagtcctagctacttgggaggatgaggtgggaggattgcttgagcccaagagtttgaggttacagtaagctgtgattgcaccactgcactccagcctgggcaacagagctgagaccctatctcaaaaaaagaaaaaaaaaaagaaaggagagagagagaaagaaaagaaaagaaaaaaaaaaaagaagggaagggaaagcccagaagagtgtggggagaggaggcggccgtcattctggggccctcagtgtgcacaaccagataacacatgctctgtgggcttttgtaccattttgcttgagcataaagaaaggaaggctgcccctaaatagaaagcactctggaggcaaacaaatctgactccaatcctggccctgccactttcccagctgaggacttagacaagcaccctagcctcttggacattctcagagccatctgctgcaagtgggtgctgccatacccaccttactgggcaggcttgggggaccaagggtggtaaatggctcagtctttcatgatgcggccacacagcaggtgcgccatccaggtccatttctttccttcctttcccccaaatcaagttgtcattaaagtactagtccacattaatgaaatcaactgtattaattttctatttgctgctataataaatcatcagaaatttagtggcttaaaccaacacaaatgtattaccttacagttctggaggccagaagccctccataggtgtcactgggctgaaatcaaggttttggcaaggttgcggtcctttctggagggtccaggggagaatccattttcttcctttttccagcttctaaaggtttcatgcattccttggctcatgatcttctatagctatagtcagaaaaattttccatcaatcatcttcaaagccagcaatggcaggatgagtcctcacatcaccttgctctgacaccagttctctgcctccctcttccacatgtcaggaccctcatgattactttgggctcactctgataatctgggatgatctctctattttagagtcagctgactgggaaccttaattccatctacaaccccaattcctctttgccatgtacagtgacatattcacaggttctggggattaggacgagcctgtctctgaaaggctactttacatgaaaattcatttttttaattaagatttttttttcctcttgagacaaggtctcactctatggttcaggctggagtgcagtggtatgatcacagctcactgcagcctcgacgtctctgggctcaggtgatcctcccacctcagcttccctagtagctggaactacaggggtgagcccccatgcccagctaatttttttttttttttttttttgagacagagtctcactcagtcacccaggctggtgtgcagtggtgcaatctcagctcacagcaacctccgcctcctgggttcaagtgattcttgtgcctcagcctcccaaggagctgggactacaggtgtgcaccaccacgcccgactaatttttgtatttttagtaaagatggggtttcaccatgttggccaggctggtctcaaactcctgatctcaagtgatccaccaacctcagcctctcaaagtgctgggattacaggtgtaagccaacatgcccggccccagctaatttttaaatattttttttgtagagatggggttttaccattttgtctaggctggtcttgaactcctgggctcaagcaaacctcccaccttggtctcccaaagtgctgggattacagcatgagccactgcactcggccttaagagaagatttaataattaatactttacaacaagatctggaagaggtgggatgagtaactaaatgaggatacaagtaacccgggtcatatttgctaatacccttggtcacattgaacttgatatcttatcagattttcctaatcagctcctttagcagcagtgttgcagcatcttatctcattttgttttttgtttttttgcctagcacatgcctgtaaatcactggattgaggtgtttagatgtttgttgtcctttggatgcttcttataaatccatatttcatggctccctggaaagtgctatgcaaatgataagctgcaaggatggaaaggaaattgcagtgctcctgaattgtaaatgggcttttacgaggaggtttctaattactcgctctttctcttgaactgaggagttgaagtgtaggtggcagatccataacagataatcatgtgtgtgatgtgacttcagcctgagcgtcgaggaccaagtcacagagcaggaacagccactctccagtgtccttggggctacgtctgaggagaacctgggatttcatatatgacctgcactggctggggggctctcttgacgtaacgtgttccctctgagcatgttacagattctgacattcttatgttccttctgtggagagacatgtacttagtgacctaactcactttagcatatttttgctcatcgtttgtgtagcttaaaggaatcagataattaccccctccccactactttcggaagcacaaatgcaatgccctagaattgtactggggactcaaaaagaaaagagagtagtaaaatctattaaaggggacaaagacagcctatatactacaagctttctatttttatggcagagaatgccattttctaagtaaacagagaactgcatttgacctgcaatatcaaatgcatggatttgatgctttggaaagcaactgttttctgcgttaatctgggtgtcttccgtgaaatgtcctcctgcctttggcttaaacactagctttgtctacagccattccatcctgaacctgcccaatcttgtctgaatcctggtttcaccactgacaagctgtgtgtccttgggcaagttacttcacctgtctgtgcttcagagtcctcatctgtgagttggggaatctggacagaatctaccccatagggcgtagtgaggatgtgttgaattatcccaagtggctacacagagtaagcactcaaatgatgtcatcgttgtcatgattgctgttaccagagcctagagttcattctgatactcgagtctgtggcccatccagcccaggtaaggaatagttggaggagttgggcatgttcagcttgaagaggagacgacaggggatatgggatagttgaatctgtgaagggccccctgggatgaagaactggcatgttctgtgtggctccagggcactgagcaggacccatttgccaaagtctcagggacacagtttctagctatagacagaaaaattttctgtcactcagaggatgaaaatagaatgagcccccttaagaggtaatgagctccctgtcattggaaggattccagaagagctaggtaaccactttaggtgctatcaaggggcttttttctttaaagtcctttccaaaagcttctgagattgcataaacaataggaagccatcttggtgctttaacacaaactctccccagtgatgagggttgagccaaagccagattggcaagcagagaggagacttgtgtacaaggagttcctcgagtcaattgctttttccttgttctagccagccagagggctcctgttggaaaacaggagaccggagaggctgaggcctgaccaaaccagcttctgcaggccagctgggaggccacaactcctacctacgggaaaactgaagggcatctctatttttagattagcaaaagaaaataaatttaagtttgagtctcctttgcaacttttaaaagacatctttattgagatgatcattcacattctataaaattcccccactttgagttacaattcagtggttttagtcttccttgatgattttgatggtcttttcttaaggctcttggaagacccagaagcctctcagacacaggtgggtgtggagggcgtagcacagaggcagacttctcatttcctgggtctcccctttaatgactctcagagacccctccttccccctgcccctggcttctaccccaggggtgtagagttttgccattttccaagcagaacttcatttcctcttctgtgtctacactctttgtgcttctttcttgccagctttttctcctttgcccgcccttccttccttccttccctccctccccccttccctccttccctctttccctccttccccccttccacccttccccccttccccccttccctccttccttccttccttcctgcctgccttccttccttccttccttccttccttccttccttccttccttccttcctggtatgtgactaatttctgtttcaggacataaatgttgtccaggctgttctttggtctttctgttggataatggacatttggcattgagagaggctgctttttctgaaatcatgttcttggggcccagaacctaggtgtgtgcttctgactttgttttcttcctgatccaaattctgatatgtccatttaaattgatctagacccacagggcactgtgggacagatcctcagtggaacatgactctgtaacgagagcattttgttttgtcaaaatgagaacatattattgcctttcatctgattgtaaacataatacatgtttataaaacagtataatgagacaaaaatgtagacactaataagggaaaatctccctaattgtatttctcttcacagagaaagcccctgttgggcatatatactctagtttgtttatttgtttgactacacatatatgtattcttttcttatgtataaaaattctgaacatgcacatttctgcaactactgttttcacttgatgatgcatggacctctctagagtgtacgtttcttcttccttacaaagcagttggcttcgcccagggtgcaccaggacacggttttggctctgtccccagggtgtcacgggaccaggggatgatctcacagggtctgccatctgccctgcctggccggaggctgcatcgagagggccaaggggcaccacgtgtcgtgggtactgtcaaacaagagccttcagagccttccacagtctttcttttgcttcccagcattgcttccccgctggtggactctgaatctagaactagctccaggcgcctctccaaattcagacgggagctggggcactattataatgcaaatctaggcaaagccctcccaataccaggatccagaatggggtggggccctttgccctgaaaagctgtttagtttgaaaatacaaacaggagacagaaaagtttggctaaattaatggataaagttttaacgatggtaaccatagtagggttcatcgacagccagcgatggttctgaacacttgacatgtattaactcacctaatccccacattttacagacaatgcaaaggaggctctgggaggttgagtgacttgccccaaagtcgcacagctcctaagtgaaggattcggagtggactccaggcagcctggtctgactccctgcactgcgctgtgcttatctctggccccaatgccgccatgcagaagtgtctgggggcactttgtctctgtcagacagaattcggagatgtgtatgcttgccctggtatggcacttctctttttttgagacagaatctcactctgtcaccctggctggagtgcagtggcatgatctcagctcactgcaacctccgcctcccaggttcaagcaattcttgtgcctcagcctcccaagtagctgggattatagatgtgcaccatcgtgcctagctaaatttttgtacttttagtaaagatgttgttttgctgtgttggccaagctgatctcgaacttttggcctcaagtgatctgcctacctcagcctcccaaagtgctgggattacaggcatgagccaccatgcctggcagtgtggcacttcttacgtgtgttcagcggacactgtttatcttctgtccctccaagacggtgctgagctcaggtcgttcattactggcagacaactgctgatttccaacagaattgccatcctcttctcccctgcgactttcagagtgtgacctcagactcaaaaattagaagtgaaaacatcttaaaaactatcaccttttcttcctaatcctcctctcccctccctgtcttccttgttgtccccatctaatgaactatcatggcaaaaagagcccatttctggtcattttctgtggcctttcaaactcccacctaccccactgctcctgggtgcattacccgaaagctgagacttcagtgcagaaagtgccaggccctctgtccccccagatcgccttccttgtcttccctgtgcttgcctgtcacattgtgtgggttccagcgctggaaggaatgaggaacagattctctggttctccttttgaagtttaccttcgctccaccacttctgagaccttcccggaagttgccccttgtttctctcctctccagggctgccccagagctgcctctcacctcttcctgctgtcaccccaccaccatcagggcagaagttgggacaaagcctctcctactggctcctgcttttctcccttaggtccagcctcctcttctccatcttcaggagtctccttctccactcacacgtcatgacttcagcacctcgcatcagtccagaatatgactgcttgttcaagtgccacctttctcatgcatttttttctagtgacaatcacagccaccctgtggggcaggagtgtcatcatccccatgtttcaaatgaagaattgcagttcagagagggcaagtgactggcccagcctcaacagctagccagtggaccccaccagggcttctgactccagtccgggttccctttccacccaaatccatggagggagctgagccgagaacaggtgtccttcaggaagacgtgaagccaaagcctccacctccaaactcaggggcccagggagtccaggcacccatccactcacaaggctggatatggtgcattccaggagaggggttgggggcgagtggcctctctgtgtacccgtggggatagatgcgcaagtggcatcgccacatcgtgagtcctggcttcatgggtgagctccaggtccaacgagaagccaagcagggggcccttcaagctcagctttgggcccgggtcggggtacagggtagagcgggcctccccagcccctgccatgaggccaaggcagtgcatcgttcgcagcgtacattcagaaaccaaagcctaggagctggttatcattccggtttacagctgatggaagagcaggtgcttccgagaacccacagtgctctttggccagtgacccaagggtgcctctgagaggcctcgcagcacccggaggtgctgctgaggcaacgccctgactgtaagaaggaccattcatcctcagagagtggccgtgatgctgctgcgacagtcccaccatccctcccgactctcactcccaacagacttcccactgtaaagctgaactctccagcaaatcacctctcgccagactctctcctcactctctctgggtccactagaggttcctcagcctctctttgccttggttttcccagctgtaaaatggagcaaagagggcctatgtacccacaaaggtgtggttggagcgactcctcctacattagggcctcgagtggggcttcatgattggttggtggaggtctccaaacccacccagtgccaccgaaggctgagactgcagatgcaatgccacaggtgtccttcctcagcctgggcagctgaacatcatgtgtaaaacggggataataagataataacagccccttgcacctatgtggctgtgaggattaaacaagataaatgtgtaacagtgcctggctatagaaatatttactcttgttattaagggaagaatatgtgtggctaaaaagggatcgaagatgtaaaagccaatccctccccctctagcatatttaagggtaatgttgagttggtttgtggaccatttgctgcctgttagagctggaaggtagggaccccctctcaacagcgatgctacaaattatacccattggaggtcaaccaaaagacaaagcttattggctggacatggtggctcacacctgtaatcctagcactttgggaggccaaggcaggcggatcacttgagatcaggagttcgagaccagcctggccaacatggtgaaaccccatccctactaaaaatacaaaaattagctgggcgtggtggtgcacacctgtaatcccagctactcaggaggctgaggcaggagaatcactagaacccaggaggtgaaggttgcagtgagccgagatcgcaccactgtactcaaaccgaggcaacagagggagacgcaatctcaaaaaaaaagaaaaaaagacaaagcttgttaataccagcatattgttaagggaataaagtaggctgcagaacaactggtgtaatatggtgccatgtagggaaaattacatgtgtgcataggagaggggtctgcaaggttgtgccctaagatgttagagtggttcctttgcttttctcttttataattttgtatttgacttttaaataaggaccataaatcacttttataaaatacattctctccagcccctactactcctttaaagaataagagtggtttgcccaagaaagacagttttttttgctctggttttcttgattctgacatcagaggaaactgcttctcatccacttggggctctgggttcaggggattcatttcaggcagattaaagtggtgaccaggggcattcgtggacacagggagggacaggagcaccatcagtttgtctcacacaaccactgtcatcctcactgaaggctgttgcctgatcaaaaacagtattgggccaggcacggtggctcacacctgtaataccaccactttgggaggctgaggtgagtggatcacttgaggtcaggagttcgagatcaacctggccaacatggtgaaaccttgtctctactaaaagttcaaaaattagccaggcgtggtgggtgcctgtagtcccagctacttgggaggctgaggcaggagaattgcttgaacccgagaggtagaggttgcagtgagccgagatggcaccaccacactccagcctgggcgaccgagggggactctgtcttaaaaaaaaaaaaaaaaaatatatatatatatatatatatatgtcaaaaatggggtagtttttagatctatagtagttctaaaaacaaaggccatccaagcatgacagatttacaagcactattggctattccagtagttacaatggaggagagaagcttttagttaaaacaaacaaacaacacaacaaacccagaaaccttaggtcaaaaccaaaattgtcctctcagacacaatctgggaattttctcatgacagtgggcattagccaactgacatcagcagcaaccatccgtgtgcacacagtggcaccacctcctcccaaaaagcagccttcatctatgccctcatacaatcgttgattattctctttggattgaggcccggaattatttaagtttcttcttgccagcatgagtctttcctttctgtatgctccttatcttctctctttaatttggcagttctgcttgaaatctgggtctttcattagtagtagttcaatttggttccagaacattctgtggtgtgatgcaatgtgaccagagctcacacttcagagctcttcaagggccagtcttactgagcacctcccagtggctgcctgtgtgctgggcgccacttgtggtgggcaggagagaggaggggacacaaaaggagacacagctccttcttagaagctcaaagttggggaccagctgccacagaagagtatgtttagcatctgagacaccaagatccagcgtcacaagggtgtttattaagcctcctcatctctttctttttctttttttttttttttttcctcaggcagtcttactctgtcacccaggctggagtgcagtggcatgatctcggctcactgcatgcaaccaccacctcccgggtttaagcaattctcctgcctcagcctccccagtagctgggattacaggtgcccaccaccacacccagctaatttttgtgtttttagtagagacagggtttcaccatgttggtcaggctggtctcgaactcctgacctcagatgattcacccacctcggcctcccagtgtgctgggattacaggtgtgagccaccgcgcctggccttgctgttgattcatctatagtatgtttgacttgatgacctccagttaccttagacagaggttctcatctaagctccaactttccatttcctttgtcctcgtctttccccttaacccctccacatttctctcaaaatcaccccacttctaaaaaatactgtttatttttcttttaaatttcaaattatctatactcattgaaataaatcaaaatagcatggaataagcgaaaaaaatggatcccacccttccccactcccattccctagggctaaccatagttaaccatttaatgactaggtttttttgttgttgttattttttatttatttattttgagacagagtcttactctgtcacccaggctggagtgcagtggtgtgatctcggctcactgcaacctctgcctcccaggttcaagcattctcctgcctctgcctcctgagtagctgggattacaggtgcctgccaccacacctggctaatttttgtacttttggtagagacagggtttctcaatgttagccaggctggtctcgaactcctggcctcaagtgatctgcccaccttggccttccaaaatactgggattaaggtatgagccaccgcacccagccctcctgggctcttttcctttagttgcactcgctccccgctcctggagtagagggatttccgagagactgtgggctccagccttcacctaggcccaggactaggatgcctgccctaacatttatctttataccttaaagcaaaacagctggaccataagcattcaagaacaaactgtgaataaggagaaagttctcccaggaaacaagagctttagttctgttgggccagcccttatattccttagctgttaccagtcactgcttgatttaatctcggctatcacttggcctgacaggtctgctgctggtgccaggatgtctgggttttgaagcctggctccattacatacttcctgtgtgaccttgggcaacttactcaacctgtctgttcctcagtttccccagctgtattatgtcagcataatagtttgttgtgtgaattaaatgaggtaataactggaaatgcttcaaacatggttcctatcatgagaaatcctgctttccgcctaaatgtgctggaaaattcctggtggtgcagaacaggagaccagagcaaaggaaagacagggtgcagaagccaaaaattaccttggagaacaaagcgcatgttaaggttatttttggattctaggtttatctctgcttggtcttcagttacctgcaagagatccatttaggggatttttgtttgtttttaacgatagctttattgagatataattcatatgccataaaagtcactcttttaaaatgtttccggtatattcacaaggctgtgcagccttccctgtccttgattccagtctgagtttttaactgaagggataaggaggaccacgctttccccagaccagaaccgcgggccagggggcgattctgctgagtcaccgcgggcgcctggtgcgcggcggcggagcccgggaccttccttggctgccccctagcgagggccgcagcgcagcctgagacacccgccggggccgctccacggccgtcggatttagactggaagctcggtccaggtccccagcttgatgcgcccgcggtgtaggagaccagcccgactcgggcttcccctgagcccctggactcttgactccagcagggcctgggtaatgaacgtcagctcccctttcccaaaggggttgctctgttgggaaggcacccgtttgatacagtagcatagagatgggttttagcatcaaaatatcagaattcaagccttgctctctgcttactagctgtgtgaccctaaaaaggtttctgaacgtctctgagcttcagtttcctcatcattccttctcacggggtggttgtgagcattacagagatcctctctgtgaagcccctgtgagtggctcatcctgagggctgaaataaacatgttattaataatccaaaactggcaagggatgttgactggtccccctcccttgcccaaggagctttctagaacctgagttatcattaccaaactgtactgccttgagtaagaaagttagaaggaatgggaaggatggtggcaggtggaggaaggcggattggtcatcacctccttgcagcaagaaacagccccagatcgtgggaaacctacagacctgctagacagactaggagcaaaagctggggctttaagaatccccagggaggttctcctgagagagtagccagttggattttgtaagcagagatttgtttggggaggaggtgacaacgtagggagcagaggggcaaagctgtcgggaatcctgccttgagggcagggatgtgtgttggggggagttgggtcactggggctcggtggccttgggcaagtttctacctctcaggtcctttacccacctagggtcgccatcctgcccacctcacaggttacagtgagcctggatgcactgtcatgggcaggtgcccaggaaaatggcagacatgttccaaacagcacgcagcattccccagtgatgcccagggtcaccttggaggtgggcgagatgcctggggtttctcgtccaccccacaacacctcaggggacagccaaagctgtcccttcaggtaagctgcacagaagatgtgaactctgctgcaaagactctattctttgggagcaaaagggacccagggtctcacctgcacatccctgtccctgagggcctaggggttcttggaggccccagccttggcaaaatgaggaagaaggtgaaggttgtctgggcccctgccaggctccttcctcggccacgcactccccttcctgcacacacacccttctccctccaccccatctccattgttgtcagaaaagtcacaataaaaaggtccatattgtctagttcccatacttttaatttttaaaattttatttatttatttatttatgtattttttgagacagagtcttaacccaggctggagttcagtggcatgatctaggctcactgcaacctctccctcctgggttcaagtgattctcatgcctcagcctcccgagtagctgagattacagatatgtgccactatgcccagctaatttttgtatttttagtagagacggggtttcaccatgttggccaggctggtctcgaactcctggcctcaagtgatctgcctgcctgagcctccggaagtgctgggatttcaggtgtgagccaccgcactcggctccacacttttcacttattaaaagactgtggtgtccatcaatggatgaatgaataaaccaatgtggactatccctcccattacccaaggaatgaagcacggagccgtgccaagatctggattcacagtgaaagaagccagtcaccaaaagccacgtgctgtgtgacttcccttatacgaaatatccagaagagatacatccatggtgacagaaagtagatgagcagctggggactggcgaaggggagaagggggagcagctgtctatgaggtccagcctttcttctgggtttggtgagaatgttttggaactagatagaggtgatagttgtacaacattgtgaatgtactaaatgccactgaatcattcattttaaatcgttctttacgttgcatgaattttaagtcaatcaaaaacagttgtttgaaaagagaaaagcctatgggtagcggcagcagtgattggatttatgattcgattccatggctcatccctcccctgcctcaccccctcgccctccgacgtcttcttcttttactctgaactgttatctttgttctcatctctctctctctctctcaaccctgcagacacttttccctttctttgtctgcccccaccctccagatttccgtgtctccagtgtctccctacgaggcatgaattgagactgggagggtgtgattctgaagaaggcaccaacagtgactcagctagccccttcccccaccccgccccccgggcctcaatttagctaaaaaaccacagggacggactcaggaggcaatacctttccaagggtccctaaaaaatgtcccattttagtgtccaggtttcactcaactttagtgcctcccctaaaatgtgttccttacctcccaccccactgcatctaagtcactgcctgagaaaacaggattgaggaaaggagaaaggaagagagagagagaggaggagagagagagagagggaggaaggctgatggatttagaaaagaagaaaacaagtggtctgaggaaaacagccttggtgtgtttattttcctgtctgtgtatcgcttctcggccttttggctaagatcaagtgtattttcctgtctgtgtgtctcgcttagattacagggatctgtgggtgatgacacgtctggtccaggctgcgtagtcacctcaagggcatgcttattgatgtgtttttcaattcactatctttgcatgggagtcccaggccaagaggcacagctgcgccatttgtctgttggtttagatatcctttatccagttcttccagagaaatcatcctgcccttctggaggaggtgggcagcaggggtcagagatgggagggaaaggaaggagccaggtccttggctaggatgccagggtcccctgcctctcacctggcctgggctggaggcctcctgctgtcctgtcactgatcactaccccgccccagcctcctgagttagaagacacaggctaaagtagagtatttcttcattgaaaaacccatacaaaataaaggttcataaaaaataaaaatttagactgggtgctgtggctcacacctgtgatcccagcactttgggaggccaaggcaggtggatcgcttgagccctggggttcatgaccagcctgggcaacatagtgaaaccccatctctacaaaaaatacaaaaaattagccaggcatggtggtgcatacctgtggtcccagcttctcagcctatggacccacatagaatacaatgtcagcataagaagggagccctggggtcaccaaatggtttgggcggcaaagaacctgaaggttgagagaagtggcttggttacccagctgttggatgtgagacctggccactgcttcttccataccctagacctgcaccctgacatctcaagtaaaaagttgggggatgttttatggtccaggatgaaggaagggcagtgaggggcagcggagcatcactttgcatttctgtctgcctcttactggctgtgtgacctggggcaggtaacttcccagactcctgggaatcataacacctatgatgatgatgatgatgatgatgatgatgacacctacctcaaggattgccctgaagggtcacagagatgcctgcaaggcacctgcatggagcaagcgccccttctctggcaggtgctgggtgagcactacctgctgccaggccctggggctatggcactgcgtgaccctgcaagtcctacctggcgaagctgtcgttcttgtgctcagtcagtgttggttgtaagactgagaagagtcacttcattttgctctccagggacatctttctgggtcctattttctgcctatgtcaagtagcgcctcaaggatgctcctgaaaatgggcttgtctttcttaacatggcaggtaggtcccaaagcattagcatggggcagctgacctagcccagccaatgcagtgcagtgactcttgcaaccgagtctaatcagaaggtccatgaacctacgagcatttcctgtcccaggatcagggtggaggctgagcctccctgcttagagattcttcccatgcattccacttttttccccaaaagaaaatattgacccttgagaggcacacagtttatttattttgcatagtaaatagtagcctgtattttaaggatgagttgatttctgcatcagcccctgtaggtcatcagccttctattggtgcatctgactctctctagccctgcagggatggtggagggggaggggaaggagggatctttattggaaaccaggacagtgagactcattgccctgtcatctgctctgtggtgctgaatgaggcagcccaacagagaaataccctgagcgagcatccccagcctccaaaacagtggcgcattgccctgagtcctgggaatgacctttgattctcctgctcctgacttggaacccatggaaacctctagaagcagctgaggaaaacccaacatgaaaagcagaactccacactgagaatataggaggtgatcggaacatacaatgattcttgctaagaccgattcacagtttttcttttttttcgatcgaagaaatactggagaagcctaaagaaggagtctaaaaactctggcacgtgggccaaaactgtccttgagctaagaatgattttcacatttttaagtggttgaaaaatgaaataaaataagatgatgttttgtgacacatgaaagctatgggaaattcaaattctaatatctataaatagtgttttatcagaacacagtcatgctcatttatttatgctcgatggctgctttcccgctacaattacgttgagcagttacaacagagaccacgtggcccacaaagccttacaatatttactatctggccctttccagaaaaaaatgtgccgactcttgaccttaacctcagcaatttgggaggccgaggcaggcggatcgcttgagctctggagttcatgaccagcctgggcaacatagtaagactccatctctacaaaaaatacaaaacattagccaggcatggtggtgcacacctgtggtcctagccactcgggagactgaggtgggaggatcgcctgagcccaggaagtcgaggctgcagtgagctgtgatggcaccactgcacctcagcctgggcgacagagcaagaccttgtctccaaataaataaataatgcaaagtaaaataaataaaaccatataaaaaggaatcaatttaaaattataatgaaagctggccgggcatggtggctcacgcctgtaatcccagcactttgggaggctgaggtgggtggatcacgaggccaggagatcgagaccatcttggctaacacggtgaaaccccgtctctactaaaaatacaaaaaaaaaattagccgggcacagtggcgggcgcctgtagtcccagctactcgggaggctgaggcaggagaatgtcttgaacccgggaggtggagcttgcagtgagccgagatcgtgccacttgcagtccagcctgggcgaaagagcgagactccgtctcaaaaacaaaaacaaaaacaaaaacaaaaaaaaattataatgaaagccaaggggcatagtagaacaaattttctagagctcattaagtcaaatgagtcaccagttagtaaaacgcagtcacggggaagagagggcaggattctttgaagcagcggctctcctaaaaacaacccacccttgtccagctgccttccctcctgagggtgttccctttgactgtgtgacccccatcccctatttcccaaccgtccaagcccacctctagcataatacgagcttttaatccctctccctgaccccaacccgattttgaagcccagtctagtattttctcaaatacacttcttggctccattccttcctttccatcacctctgccttttcactgcatgcttggaccactgcagtcagctccctatgaacagttgctctctacccatccaatcggccccgcctgctgctgccaaattcaccgagggcacctctgtggtgctgcctgtggacaaagtccaagccagccacctcacccacctacaggtgagtggggagcagccagcgtgtccagtggtttaccccatcgccacagacttggtgatgtgtcgatgtgcagagaaggggtgttggcagccacaacacaagcaaccccgccccatgtgagatctaagatgggcgtgctgggagccacctctgagaatccaacagaaggcagaggggagaacggctcacacggcacaaacactccttccttttttttttttctttttcctttttgaaaggagtctcactctattgcccaggcaggagtgcagtggtgcaatctcagctcactgcaacctccgcctcctaggttcaagcgattctccagcctcagcttcccaagtagctgggattacaggtacactccaccatgcccggctaatttttgtgtttttagtagagacggggtttccctatgttggccaggctggtcttgagctcctgacctcaggtgatctgcctgccttggcctcccaaagtgctgggattacaggtgtgagccatggggcctagcctccttccatttaaatgtatgcctaatttgcccattgagaacggctgagacgcattttaagtggccagggtctacttagagttagtgctcatgaccaggcccaggtcaagcctggctggccagatggtgcctttgacctgctctgtctctgtgcaaaggaatgagctgaaggatgggggtgcagtgtgtgggcagtgggctggggctggcaggactcagtgactaagggaagagaactttcctcactaccagcctgtcttttcagggcaccgcggggggctttgggacttggtgatgaacacagcacagagagctgtccagcatgcgggtccctggcttctcacacttcccaggctccttcagaggctctctccaaagggagctgctctctctagaacccatgaatttggaatataggcaaccactgcattggggaccactgacctcaaacatagagaccagagcaaatggggctcatcacgtgaaactcatctggaactctagcaggttcttttatatatatatatatatatatatatatatatatatatatatatatatatatattttttattattatactttaagttctagggtacatgtgcacaacatgcaggtttgttacatatgtatacatgtgccatgttggtgtgctgcacccattaattcatcatttacattaggtatatctcctaatgctatccctccccactccccccaccccacaacaggccccagtgtgtgatgttccccttcctgtgtccaagtgttctcattgttcaattcccacctacgagtgagaacatgctgtgtttggtttttttgtccttgcgatagtttgctgagaatgatggtttccagcttcatccatgtccctacaaaggacatgaactcatcattttttatggctgcatagtattccatggtgtatatgtgccacattttcttaatccagtctatcattgttggacatttgggttggttccaagtctttgctattgtgaatagtgccgcaataaacatacgtgtgcatgtgtctttataacagcatgatttatattcctttggttatatacccagtaatgagatggctgggtcaaatggtatttctagttctagatccctgaggaatcgccacactgtcttccacaatggttgaactagtttacagtcctaccaacagtgtaaaagtgttcctatttctccacatcctctccagcagctgttgtttcctgactttttaatgatcgccattctaactggtgtgagatgttatctcatggtggttttgatttgcatttctctgatggccagtgatgatgagcattttttcacgtgtctgttggcgaactctagcagcttcttttcacaagttcatggagagaggtttcccactgagggaatcacatctgtctgatcaaaagaggcttgggaaatggctctcctgttcattccctgaaaacctctgatggaaccactgccactgtggcagccccagcactggcaccccagccatgattggtgccccagccacatctctgctgtgagccccagagccctggttaattaatcatccacgtgttgatggggagaggcccattcacaaaagcgacataaagcccagggagacgtggccgtggcaagaagggtgtgggactacattccgcccccaactgagagattcagaaaccagaaaaaaatggaaaaacatactgtgctcttgggtgggaaaactaaatatcatgaagggagcaatttttatagttttggcctataatacaattccagccgaaatcccagtggaactttgagaatttgcaggaaaaaaaaaaatgtctaaagtacatctggaagacaaacttacaagaaggtcaaataattttgaaaaagaaaatgatatctaagcccacctagagaataagacttgagatccaaagctaaatcaggaggctctagcaaaattgacagataagcaggacagagtgcatggtgcattcacctggggaagagggcagattggtctacaaataggcctgggtccactgactttagctgttatatttggggagaaacttttcaacctcactccatcttaaacctaaaaatattccagatgaattaataaatataaaaaattagaccactaaaaatgtagaagaaaatggatgatctttctataccatagagcaatggaataaatcacaaaggaaaacagatttgactatataaaacttaaaccctgcccatcaaaaaccatcagaaaccaaaataaaaggcaaccaactggagaagatagttgccacaaatatgatcaagggttaatgttattcataaattaagagcccacacaagtcattagaataagcactgagacctgaacagacaagcaaaaagaatgagagtgggtcggcgcggcggctcatgcctgtaatcccagcactttggaaggctgaagcaggcggatcacttgatcccaggagttccaacaccagcctgagcaacatggtgaaaccctgcctctacaaaagtcataaatattagccgggtgtgatggcacacgcctgtagtcccagctactcaggaggctgaggtgggtggatcacttgagcccgggaggtagagtctgcagtgagccaagatcacaccgctgcactccagctggagcaacagagtgagaccctgacttaaaagaaaaaaaaaaaaaaagaggagaaaaatgctgatctcactagtaattaaaacatcaggccaggcgcagtggctcacacctttaatcccagcactctgggaggctgaggcaggcagatcacttgagatcaggagttctagaccagcttggccaacatggtgaaatcccgtctctacaaaaaatacaaaaattcgccaagcgtggtggcacatgcctgtgatcccagctactcgggaggctgagacaggagaattgcttgaacacgggaggcagaggttgcagtaagctgagatcgtaccattccagtccagcctgggctacagagcgagactctgtcccagaaaaaattaaaacatcacatatttaaacaactctaggatatcatttaaaaaaacattaatagactgttttttagagcacttttaggttcacagtgaaactgagtggaaggtacagagacttcccgtatgttccctgccctccacgtacagcctcccccactgccaacgtcctgcaccagagtggtacacttgttacaaccaatgaatcctcattaacatatcattatcacccaagttcatagtttacattagtaaaacatcatctttcatctataagcacaaaaattttttggcatttatttaggtgtatgattaactcagtgttgacaagactcacacttcatacccacttgcactgcatctgagaagcaattggtgtctacagccgctacaccctcaacaagcccgatcttgtttgaaaagcaattggtgatgcttctcaaaattctatggacaaagtcagccgggcatggtggctcatgcctgtaatccctaaactttgggaggccgaggcaggcagatcacctgaggtctggtgaaaccctgtctctactaaaaatgcaaaaattacccaggcatggtggctggggcctgtaatcccagctactcgggaggctgaggcaggagaatcgcttgaagcaaggaggcggaggtttcagtgagccaagattgcaccactgcactccagcctgggtgacaagagtgaaactccatctaaaaaaaaaaaattatggacaaagtttttcaaaaagatatttaatgcaactttatttgtaatattggaacatctgaggccatttcagtgctaactattaggggatggttaggaaaatatggtacatatgtggaaaggaacatttggtagttagtgcccctgatgtttacaaaggcttttagtgaccaacaaatgctcatgctataatcttatgtgaaaaaagcaagtagcataattgcaactatatttttaatgcatagaataaaaggctagaaggaaatatcacagatccttgacatacattcccaaacctttgtaaatccgcggattcatgaaaacagacacatttgcacaagtgcctgatcttttctgttatacattcattagaagtcaagccctggtgccacaaagtatctgccttttcaaatgtgatcagaatgttctcttttgcttcaaggccatttttcacgaagcagtggcatttttgcctcttcatcagagtcaccgtgtgccctggaggactgagaacagcagagccgttttaggatgggacagggcagccaggaggattgggctcactccctactgagtgcctcactcccgtacagcccccatagaggaagaggggttcaaatttattcctcagccagatggcatgtgccgcctgtcctggaatttcacatcacttatgatggaccaaaattccaaaagctgaatccatgattgtcaaagtctggtatggcaggatgtcaacagtaatcgtttctgggcagagggatgattttctcttcccatcttgctttgtataaatacattttctataataaggttgtattacttttctcatcaagaaatagcaaagtactgttttactcaaaatatgaatagagccaggcatggtggcagcttatgcctgtaatcccaacactttgagaggcggatatgggaggatcactttagcccaggagtttgagaccagcctgggcaacatagtgagacccccgtccccactcccccaaagaaaacccacaaagcatttatcctggattattcacaggggccaaaaaaaaaaaaaaaaattcaggcctcctatagccatgagctacgaatatgaaaatatgcaaatgtgtaagaaaagccagcacatccgatttttacttttactttcacacctctgtccaccatgttccaagagaagaaacttggtcattgaaaggaatagatcaaatccaaagaacaaaaccactgtgctcattaaacttcttagtgttcacaaagctttagctgcaggttgaatggggcaacccgaattggctggctcacctgggctgcagggagcagagatcgcgacactgcactccagcctgggcaacaaagcgagactctatctcaaaaaaaaaaaagttcataaattcaaagttatgaattatttttaaaataataataatttacaataaagatgaggacaaagtgtgagtaaatggtggtttctatccagctctgttgagctgaagtggcatctccctgctggggcttttggggaagaagggtgtgtgttgctcttcagatcccaagcctcatgcccctactgggccctgtggggtgcttctcagcccaccaggagagccaccgttggaacacacacgtgggggacctggtgggtgccggtgtggtgaatgggggccacagcctgactccaggaagccagcaaactcggagctggaggagtcaggacacccccgatgagtcaagagttggttttgctgccagttgacatctgattgaaccatctcttcacttctccgtgcctcactttccttaccagacaggctctgctgatgctgtccctctcctgttcagtcgtgccctcaccgttaaagagaaagagcaaactgctgggcagcagcattgatttttttaatgaagtggaaagagagctgggaataacaagtcgggcccacctcacctgcctcacctggtgggtttatttgttttgtttttttttttttgttttgagacagagtttcaccctgtcacccaggctggagtgcagtggtgtaatctcagctcactgcaacctccacctgccaggttcaattgattctcctgcctcagcctccccagtagctgggattacaggcacctgccacatgcctggctaattattgtatttttagtagagatggggttttaccatgttggccaggctggtctcgatcccctgacctcaggtgatccacccacctcggcctcccaaagtgctgagatcacaggcgtgagccaccatgcctggccgtcacctggtggtgttgaatatgaactgctgcggtgttggtaaattaagcaagcagatagatgtaaataacgcttgggcaggaatatggagcacgggatgaggatgggcggccaactgttagagagggtagcagggaggctgagatctgcctgccatgaactgggaggagaggctcctctctctcttcacccccactctgccccccaacactcctcagaacttatcctctcctcttctttccccaggtgaactttgaaccaggatggctgagccccgccaggagttcgaagtgatggaagatcacgctgggacgtacgggttgggggacaggaaagatcaggggggctacaccatgcaccaagaccaagagggtgacacggacgctggcctgaaaggttagtggacagccatgcacagcaggcccagatcactgcaagccaaggggtggcgggaacagtttgcatccagaattgcaaagaaattttaaatacattattgtcttagactgtcagtaaagtaaagcctcattaatttgagtgggccaagataactcaagcagtgagataatggccagacacggtggctcacgcctgtaatcccagcactttggaaggcccaggcaggaggatcccttgaggccaggaatttgagaccggcctgggcaacatagcaagaccccgtctctaaaataatttaaaaattagccaggtgttgtggtgcatgtctatagtcctagctactcaggatgctgaggcagaaggatcacttgagcccaggagttcaaggttgcagtaagctgtgattataaaactgcactccagcctgagcaacagagcaagaccctgtcaaaaaaaaaagaaaagaaaaaagaaagaaagaaatttaccttgagttacccacatgagtgaatgtagggacagagattttagggccttaacaatctctcaaatacagggtactttttgaggcattagccacacctgttagcttataaatcagtggtattgattagcatgtaaaatatgtgactttaaacattgctttttatctcttacttagatcaggcctgagtggcctctctttagcaagagttggttagccctgggattcttactgtagccacattaataaacaacatcgacttctaaacattctataataccatcttttggccaaattgacttcgcctcttcctctctctttccaaatgaaatgtgtttcatttcactgtcagaccacatggttggggaccccacagagcacacagccctccctctgccttcccatgctggcccttcacccactgctggagtgccaggttggtccaagggttggaccaagttgtctgaggttgtctcaaggttggtcgaggctgtctccgcgctgggttgtgctacaaggagcccttctttccatgggtgtggctggcagtgagtgctcacagcaacagcccacagtgcagcccgagggcaggatggactcagtccctgcctccatacccatttctaaggaggcaaaatggcaaacactctacttttctcttttaatgctaaaaataagaaaacaccttgcagcccagggtatgggtagtgcatggaagccgtggagttgtgaggtgggaagtgacctctgctggatatgtctattcaggaagattgctggagtgggtggggtctctgggaggtcccctgagtgtgggaagctgggaccaccagctttctcgcacagggagtggccatcccagcttggagaggttccaggactggttgggaggcacgtttcagatttctatctgttgaatcagcgaagatattggattatgaggaatttgggaattaggaaagtgggtgcaggtgggttgggggtaggtgaaggaagacatgggcgtattgggggagcaggggctgctcagaggtgttccagaagctctgggtgaggaggtgagagggaccggggaatgcagctcggcccagcctccctgcctgaggtcagccatcacgtggtgatggcaagatggaaatgtgctttctgactgctccagccagtgctgccagattcagctccccagggagggcacctgagaggctccaagccaggagatctgttttctcctttgttttgtttttttttgttttgttttgttttattatactttaagttctagggtacatgtgcacaacgtgcaggtttgttacatatgtatacatgtgccatgttggtgtgctgcacccatcaacttgtcatttacattaggtatatctcctaatgctatccctcccccctccccccaccccctgttttctcctttgaatccttcttagaggccgggcgcggtggctcacgcctgtaatcccagcactttgggaggctgcggcaggaggattgcttgagcccaggagttccagaccagcctgggcaacatagtgagacctcgtctctacagataataattttaaaaattatccgggcatagtggcatgcacctatagtcccagctactcaagaggcagaggcaggaggatcacttgagcccaggaggcggaggttgccgtgagccaagatcccaccactgcactccagcctgggcgacagagacccccatgtcaaataataataataataaataaatccttctcagtcccttcctcactgtgtccccctccactgaatttttccacctcctctcccacttcccccactcccgctttccctctccttctctccccactccatctttttctttctctgctgtttctcgtccctccctcctctccatcccacaacactgcctaccctgtccctgccccaccctggtgctcaggatgtgtgaagtgaggggtggtagcccccaagacctcaaccccgaaggttagcctgttgaaaccactttctcccagctgcccccctggcagttggtgctgctgggggaaactgggattgggggccagattttgcctcttttcctgacaaagagagatgaagagttctctcaccaggtgcctgggactggggtgtgggtgtcccagcctatcccagcgcatctgttctgcatcatgattaatagtgctgctttcagccgggcgcggtggctcacacctgtaatcccagcactttgggaggctaaggtgggcagatcacaaggtcaggagttcgagaccagcctggccaacatggtgaaacctcgtctctactaaaaatacaaaaattaaccaggtgtggtggtgggtgcctgtagtcccagctacttgggaggctgaggcaggagaatcacttgaatctgggaagcagaggttgcagtgagccaagatcgtgccactgcactccagcctgggtgacagagtgagactccgtcctaaaaaaaaaggagttttgctctgtcgcccaggctggagtgtagtggcgccatctcggctcaccgcaacctgcgcctcccgggtgcaagcgattctcctgcctcagcctcccaagtagctaggattacaggcgcctaccaccacgcctggccagttcttgtatttttagaagagacggggtttcaccctgttggccaggctcgtctgggactcctgacctcaggtaatccgcccacctcagcctcccaaagtgctgggattgcaggcatgagccaccgtgcccagtcaactccttctcaaaaaaaaaaaaatagtgctgctttctctttcaagtgtcctgatttgggtgatagtaaatgccactctacttataagggatctacctcagaatgctaattgggacatttttgtagcactctactgttggcagcaggtgatgctcacaacagcccgtgagggtggatgacgtccgcttcacagatgacaaaggagcctcatgctcagaccgtgggctgccagagcaggtccatggctgcagccccacatggaccatatttcccccttgtcactctttccaccaagctcccttggaacttcagttattaagctctcttgggtggaatccaagttagaatcacaacatgtgcctcatatggattgtgccagtgaaaaatgacattctatttagaggcagggcagcctggcttagagtcagtttaaaatatgtattatgctgcaacaaatgtaccatgatcctgtaagatgttcacaacaagggaactggatgtggggtatactgtctgtactaacttcacaagttttctgtaaatctaaaactgttccaaaataacaagttcgtttaaaattaactccaggagaccaggtacggtagctaatgcctataatcccagcacttcggaaggctgaggcaggtggattgcttgagcccaggagtttgagacaagcctgggcaacatggtgaaatcctgtctctaaaaaaaatcacaaaaattagccaggtgtggtggcgcattcctgtagtcccagctacttgcggggctgaggtgggagaatcatctgagcccaggagtttgaggctgcagtgagctgtgattgtaccactgcactccaacctgggcaacagagcaagaccctgtctcaaaaaacaaaaatgaaataaagtccaggaaagaagtaggttttaccactcttattttctgaagagaaaactaaatttaatgtgtaaagtgaggacaagttcaccaagttagtgtttgagttgcctaaaatatgtttgctaaaactattcaaagctttcacataaaacatgatcagaagttctatgccaaaacatatgtgtgtgtatatatatatgcactatatatactgtatataaaaatgcaaaatctaaattgccaaccttttagaaattgctctgaaaggaaagcatttcaagataatttgcttacccaaagaatatactttccaagaaagcaagtaatacttaaggtgttcataatcctcatcaaattaattcttgctactgaaagcttacaaggagctgttttgatgtcgggtgtgacaggtttgacttggcagaaggtgtcactttactaacaacattttaaataagtgacagaagacaagaaactacacgttaaatgccagaacaaagagtgtctaagtggatgctaagagttgaaatatggctggatacctgcccaagagagctgaaaagtagatgaaagttggttacctataaactagtgcaccctaatgaattaaaaggtgttgatgagttaacttgttatgccttccagataagacatgcaaatggggcttcttcctccttcactacttccaagggatttaacaaggagaccaatgcaaatgataaggactgtagggctcaagctggggacagattggggaaagggggaccatcatgcccatatagatgtccctgtgccctggcagtcaaggctgctgaaaaataacaaaacccagaagtctgcgtgatgctgcctctccatttgtccaaagccttcttgcggcagtttgcaggcttttgcaaaagctccaggaccaaggagctatgttcatgctggaagcttgttcaggattagctgttctttgtgggatgggtgcagccagggccaggtgtccagggacagtgttttaacaaagggcatgaggtgtctgatctcacagtggaactccacttgcctttttttcatcttctcattctgcttcatgcacagaaccagccccatcctgaaactgactctaaattactcccgccccaggtggagtgcctttctcggagttcaacagagccttcctgtcgcccaagggacaactccactgaatgcccaagccacacccaaaacctaacaagtaaaaaccaaattctgtgctcccccatcctgggccattcctggtttctctactgctgttggtgataccaccatcagcttgtccatcatgaccctggccagttcctcccacaaccctccacagcacccagggacctcacctccattccatccgacacagatctcctcaccacaaaccttggttttgcaacagcagccatgagacctttacaccctccgcccttcatcctgtcccccactgaggccccagagccattccttaaagcagcgcgccacaaactataacccacaagccaattctggtacccagcctgttttgcacagccagtgaactgacaatgatcttttcatacagccagaaaaacaaaacaaaacaaaaaacaacaaaaaaaaaccccaccattctgagcatgtgacttccatgttcaagatgtctcatgttcagaaaggcccctggaaaaggaggaaggggagctgggcacaaagggagaccctctcagctgagctcctcccatccagacattttcctggacttcctatccaatgacttcccttagcttcttatcagccacccctgtctgcccaggaggctggaagatgtggccttttaactgggcacagctctgtcctctatcatatcagggctctgttcccaaggagggtagagagaatggacaccaggtggaccctcagcagtctgtgccacagagggagtgtttgcaatttccagactaaaagtccccatgtgcttgacggggtatgtgactacaacgtgatgcttgacttttcctcatatgaccagagccactttgtccatctggtacaatgtcagctatctgctaggggccctccaggattcccagtcaattccatatctgcatcaccaccattggcactaaataaaataaaatactcaagttcctgctggtgagcatgagcagtgctacactgggcccttcaaccaaggtgacatgataatgactgaaaataatcactgccacttattggggacgtctcatctgccaggcatggtacaaagtgctttaaataagcattcaacaatttcatgctgacagaagccctgtgagccagtggagctactactatgcccattatacaggggagaaaactgaggcagagagaggttaggtaattcgctcagcctcacacaaccaataggtggtggagccaggatttgggccccatctgcctgactctctagaggctctatcttccagtcttccagagttgagtctaagccatgaataggacaattagacagcagaggaaacccattcagccaccatgtgcatgaagagtaaggaatttctgtcatacagaggggagtgaattcactgagctgagagctgaggaaccattgatctgatggctgagacaccactgggaagactggagaggcttttctgggcatgcagtgccaggcacaggaggagctgagggaagatgactaagaggtactggcaaagaattcagaaattctgatggaagctttacatgttaccatcacatccatccatctatccacccatccatccacccatatcttcctccctccacccaatcatgcatacatccagtcatctatacaccacccacccacccatccatccatccatccatcccttcatccatcccatcatccatccaattatacatacatccaatcatatatctgtacataatccattcttccctcggttcatccatccatccattcatccatccatccacccatcccttccttcatccttcctatcatccatccaatcatatatctgtacataatccattcttccctcggttcatccatccatccattcatccatccatccacccatcccttccttcatccttcctatcatccatccaatcatacatatatccaatcatacatctgcacatcaccagctcatccatctatccatttatccatccatccttccttccatccatcattcatccatcatacatacatctaaccatacatctctacatcattcattcttccatcgattcatccaattatccatcattccttcctccatccatcccattatccatttgatcatacatatatcatctatacatcatccattcatccatccatccatccatccacccatatcttcatccaatcaatcatacatacatcgaatcatctacacatcacccatccatccatccatccattcatctatccacccatccatccatccatccatccattcatctatccacccatccatccatccatccatccatccatccatgtaaccatccagtcatatatccaattacacatccatccagttatacattcatacatgcatctaatcattcaattatacatacacacatccatataattctacatccaattatacctccatccaattacacattcatacacccacctaataaattattaattcatatatccatccatataattatacatcaattatacatccatctaatcattcagtaattcacccaccatccagtcatctatccaataatacattcatccaatcatccatccatccatccacccattcatccatccatccgtccgtccacccatcatggtatgagccatgatttaccacgatggtcccctgtggacagcccaggtggggcagaactgaagggaagcccagggctgcccccataaacatttgcctcctttacatggatgagaactagatccacatgtataaatcctcatgatttgaaggtgcttttaccaacattcactcatgggattctcccaggagctctaggaggaggcaggtagagttgaggtcatctcacgcattttacagatgaggaaacggaggccctgagaggcaggtccaaggccacctgaccagaaagaagtggaactgggacttgaacccagccatcttgccccttggtcccatgctctctagcctgtaactcctgcttcctggtggggcatctccaggaggaccctatcggctggccatgggcctgccctggagtcttttgctctgtgtggccatccttcctccctcaggagagtgtgtgctcccagagcacaggctgtatcttctgagcattttgtcccttcccagtacctagcactcagctctgtatacattgggctctcaagaattctcaaccttccagagtgtaaggccttgacctgctcagccctggatactgcatgatgcattgataagcccataaaataaccagggcagattgactcccagtggccaaagtgccacagggaagggacaattcagcccttctaggaggaggaggaggtagttttctcatttctattaaggcaacaaaagctgccttactaaggacattcttggtggagggcgtgactgtcaaccactgtgatcatttgggcctctcttgcccaggcttcccattctgaaaggacagttttattgtaggtacacatggctgccatttcaaatgtaactcacagcttgtccatcagtccttggaggtctttctatgaaaggagcttggtggcgtccaaacaccacccaatgtccacttagaagtaagcaccgtgtctgccctgagctgactccttttccaaggaaggggttggatcgctgagtgtttttccaggtgtctacttgttgttaattaatagcaatgacaaagcagaaggttcatgcgtagctcggctttctggtatttgctgcccgttgaccaatggaagataaacctttgcctcaggtggcaccactagctggttaagaggcactttgtcctttcacccaggagcaaacgcacatcacctgtgtcctcatctgatggccctggtgtggggcacagtcgtgttggcagggagggaggtggggttggtcccctttgtgggtttgttgcgaggccgtgttccagctgtttccacagggagcgattttcagctccacaggacactgctccccagttcctcctgagaacaaaagggggcgctggggagaggccaccgttctgagggctcactgtatgtgttccagaatctcccctgcagacccccactgaggacggatctgaggaaccgggctctgaaacctctgatgctaagagcactccaacagcggaaggtgggccccccttcagacgccccctccatgcctccagcctgtgcttagccgtgctttgagcctccctcctggctgcatctgctgctccccctggctgagagatgtgctcactccttcggtgctttgcaggacagcgtggtgggagctgagccttgcgtcgatgccttgcttgctggtgctgagtgtgggcaccttcatcccgtgtgtgctctggaggcagccacccttggacagtcccgcgcacagctccacaaagccccgctccatacgattgtcctcccacacccccttcaaaagccccctcctctctctttcttcaggggccagtaggtcccagagcagccatttggctgagggaaggggcaggtcagtggacatctgatcttggtttagtatccttcattttgggggctctgggtgtggcctgggcctctggactttggccacggtgtttgttccagcccttctcctaacctgtcctttccagacactcggcatctaggttattagcacctcgcatactttctgacatgctcctcagtcctgattttgaccatcttctcttgcttcccatctgtgtcagtcaagactgcatttggctgtaagaaacagaaaccccaactaactgtggcatttacatgaagaggtttacttttctcacataatcagatgtctagacttggccagcacctcaagggtcattgatgctctcctgtctttattttctgtcatctttagtggttggattgttgcctcatggttacaaagtggctgctgcacttccaggcatcacatctgcctttgaagcaggaacaagttgcaaagtaaagtggccaaaagggccctgaaactaaatgtgtccccttaggaaagcaggagttttcttgcaagtggcaatcttctgcttatgtctcattggccagagctgggtcttacggccaccccttgctgcgagcaaggctgggacattgagcattttgccgtccaacctctttagcagaataaaccaagggggaagaacgttaatagtggcttttgagtcactagttggcagtatctgcccctctatctttccatcctccccatggagtttcaaggttcctttctcagtacttcttcaggctctgcacgttcatttggatcttgtgtcttggggtgaaaaactggcccaagtgtctccccaagcatccacctttggattaatttggaaaatggctgtcaagtgcccgcctcttgcttggtataatgctacagctttagaggacgcagcaggcatgggccttgccgctgaggttcttagcctcatgagaatatccagatcagattctcttggctccttcttagagccagtgatgcaagacacttcctgctcatcttgtcgggacggttttacaagttgcctgccatcctgagaaagtctacaaaacgatgccagacctcatgccagcttcccaagccttgactctcagtgctccctcaacaggattctggaagaatctcccaaacaagtcgcaatgccctctggaccctgtgcaggcatgagactcaagagcattggctcccacccctggtggagggaacactgctggggctgggatcttgcctggttgctccgcctgcacccaagacaaccataattaaaatgtccttcattgaacttggaaagccttcaaagctgacaactccttatgtgtacccggaaaggcctgggagtgtgccagggcattgctcgggagggacgctgatttggaagcatttacctgatgagagactgacagcagctcctggtagccgagctttccctcctgcctctgctgtgaaggtggacccatccaacagtcaaatgcctgactctggacaggagcggacctatttattgccatgcaagggactctgcacttttgaattgtgggtcatgggcttggatttaggggttagagctgggagaagtcttggaagtcacctagagatgacactgccattttgcagatgaggaaaccgtccaatcaaaatggaccaaggacttgcccaaagcctcacagcaaaaccataggcccccgcactaaccccagagtccctgtgctgtcttaaggatcatatagttgtaagcaatcatctggttttcagtatttcttcttttaaaatgcctggggccatgcccagcagtctgtttcactgcagcgtttacacagggctgccgggctttcctggtggatgagctgggcggttcatgagccagaaccactcagcagcatgtcagtgtgcttcctggggagctggtagcaggggctccgggccctacttcagggctgctttctggcatatggctgatcccctcctcactcctcctccctgcattgctcctgcgcaagaagcaaaggtgaggggctgggtatggctcgtcctggcccctctaaggtggatctcggtggtttctagatgtgacagcacccttagtggatgagggagctcccggcaagcaggctgccgcgcagccccacacggagatcccagaaggaaccacaggtgagggtaagccccagagacccccaggcagtcaaggccctgctgggtgccccagctgacctgtgacagaagtgagggagctttgcgtgtttatcctcctgtggggcaggaacatgggtggattctggctcctgggaatcttgggttgtgagtagctcgatgccttggtgctcagttacctccctggctgcctgccagcctctcagagcatttagggccttctggacttctagatgctcctcatcttgcctcagtcagcgcgtcagttccagagacttctctgcagggttttctggggcaggtggtggcagacccgtgccttcttgacacctgaggtcagtccaccctcctgctcagactgcccagcacagggtcacctcccaaggggtggaccccaagatcacctgagcgcacagagggtgcagatgactggaccacaccttttggtgatcttaatgaggtggtcccagaggagctcagacatgcaatctagcatccagttctgggactctgtctccttttcaaacgtattcatgtagaacaggcatgacgagaatgccttgtcaacatgggtgatggggaatcaatcagacagggcgccgggctcaaggctgcagtcacccaagagtggctcagcccaccaggccctaggaaacgcctgcacagcctggagctcctggagtcatttccttcatgtcttcttcactgcacttacgtaaagatgccagccattggtttggtgatttggagggtgcccagttgcccaacaagaaatgcagaagaggcctagccaggatttcaccagcagtggagagtagagaagatgtggccagaaaagagtttcctttccctcctaaagatggtactccctgcagctactggggaagcctgcagcattctctagggctctgtgtgttgagagcagccccaccctggccccttctgagtgcatttctgctttgtgacttgatccgtgaagtcccctgagatgggcagaggggatgtcctcgaagctggggcagagcctcatccttgaacgtgaaggacgtttgaagactgtggcatgatcacaggatgagatcacagggaacttgagtttctctcctcctctcccttcacagttatttcactgagggaaatccctcccctgcccagaatgaaaactctagccaactcttgacttttccatcactccaaagtagttgaaagtacattagtctccacagtggcaaaacagtgtgcaaaagctaaataattagaacagccagtcccatgtgacagtcaaagcttctaactccattcaaagttgcagccattcccctcgagggctggcagggaggggaggggtaagagaaacaggaaggttcttactgagttggtcctggtgtgagctgcgtcacactccctgcagaggtttcaaggagactctctctctctctgtctccatggggaccttatttgaattcttctactcttaccccagcctgccatctccagctatcctcccctgaagagcccttctgctgcgctggattctggtggccatgtcatctcctcggccccgtgggagtctgaagatctggctgcagcctcacctctgaggtcctgctagttgccacctcttaaacatgatctgaggctcccatgcactctgacctgtgcccacatggggcccacgggaaacacgctggcaagcaaactgtgggtgtgcagacggttctcagggctgcagcacctgtcctttgctctgcccccaaagcaaggccagcccatcttccatcctctagtgttccttggtggggccctgaccacagtccaccaggtccctaaccagaggggacacacaccaggtgtcctcaatgtattgccttgaaacagttgtgctgggactgtgatggggggtggccatgtagccacccccaccacccccaagccactctctccaaggaaatcctcctaaagatccctttacatcctccatgtggtggggaggttctagagttgggtgcatgtgtcttcagctactgacaatgcagaccttagttggcacctcgctctggcctatcctgtttgctgttcttggcgctccagtgaaactccccatgggccatccagttggggtgcagtgtggccacccccttgcaggttcctgccttgctggagagcacagggccctcctggctcttgtaaaacactccccatggtacagagaggccagcagtgatgtgaggcccaacctccctccatggtgttcccaagcagctccctttctggggtcaaggggtggcaaagacagtgcagcgtccaatttctgactcaagccgggcctggctatcgcagctctgcactgtgtgtgacagcaaggcaactcacccagtgccgtggcagtgaccgtgtccgaggaagcctcctcacaccctctgtctcaaggactctggcatttagctggacttgctgtagctctgagcctttctgccattgccatcaccttgtcagaaactcaggccgaatctgcactcagagttgtgcccaggcagttgagccaacacttgctcagcgatattgtcacatgacaaggcactgtcaccactgggcatcgtgggtagcgcagtgtcggctggatggacccggagggtgtctgtgtcatgctagtgctagtgatgggagccccgtgagcccattgcccgccctcccatgccctcagcagctgcctggggacagccaatggcctgggtgtttctgaggctaccacatggcttccaggaaactcgagaacctttctctcccttgcctacactcttcacacaggcctgtgctggccagcggtggggatccggcattcctatcttaggtgcagagagtgactgactcattgcaggcctgggagataagactgatggcccagccagcaagatgtatggatttctcagaggcagtggcctctgtcattgtcctcaggaaatgctggtgattctggtggcctgaggtcaatgcatgtcaacgtggccaacttgccttataaactttttttctggacaattgcgtgcactgtcctgtaacagtgtcctgttgtttatgatgcagaaataggtgtttttaaagcctattgattttggtactattaatgtggtcaggaactttctcagtctttcttgtttggggtgagctgtggcttcctaaacaggaacccaagacacccccaaaagctgctcaccagcactgccagcctccctcttaccaagtagcacccgttcaggacattctgcgaaaggcatttgcccagaagttgggaggaaggaaatgtaacattttggggcacctaccatatgccaggcaccaggctaaacgtgttcacacaaattctcttactaaccctcaccatccttctacaagacaaactagtatcttcatcttggggttcaagatgaggaaatggaggctcagagaggttgaatgaatgccggtgcctggatatgaaccccatctgcctgactccgcaacccaggcaaagtctttccttgaacttcccagcagccactgcttagacacagcctccacaaccatggctcagcagcaaattgcttctctgacctcactcagcctgtgtgtccttgttgagtgaggcattcaggaccctggtcccaaagtggagaaagtctttcctactaggtcatagctacacctgcatgtgggtgctgtgccttttgtttagtgaacttttatcaccagcatcctcagcaatgacatttgcagagaagccagagctgaggcaccttggtattcttgggatgtgactttcctgaatgtttaagggaaaatgcccgaaggtacagagagcttggtttctagtaaacaataactgtcttgcttttaccccccttcatttgctgacacatacaccagctgaagaagcaggcattggagacacccccagcctggaagacgaagctgctggtcacgtgacccaaggtcagtgaactggaattgcctgccatgacttgggggttggggggagggacatggggtgggctctgccctgaaaagatcatttggacctgagctctaattcacaagtccaggagattttagggagttggttcttatcaaaggttggctactcagatatagaaagagccctagtggtttttttctaataccatttctgggtaattcctaaggcatttagtgttctgaaagatgctagccttgtccagcctgggagttgagaatgaatgtctaacagaaactctaggccgggcctggtggctcacgcctctaatcccagcactatgggagacccaggtgggcagatcacctgaggtcaggagtttgagaccagcctggccaacatgtgaaatcctgtctcactacaaataaaaaaattagccgggtgtggtggtaggtgcctataatcccagctactcaggaggctgaggcaggacaatcgctcgaacccaggaggtggacgttgcagtgagccgagatcgcatcattgcactccagcctgggcaacaaaagcaaaactccgtctcaaaaaaaaaaaagaaactcaaatatgtgtgacaggcgattctcactgcaggctgccctgtggctgatccaggagcaaggccttaaccatgtcatccccaagcgattgcttgtaaactttcttctgtgcagccttcaacccttattatgattttcttctcaggaaccaaactgctgtattcaagaaaggcagctttgtgtaatcatttatcataaatatcttaagaaaaatcctagagattcctaattttaggaaatgggagacctatggtactgatataatgtgggctgggcttgttttctgtcatttgctagataaatgaacttgagagcctactgtaaaatgtggaagcttctagattgcagaagggctggaaagacactgttcttttctcccgagtgatgggatctgtccagtatttagagctgcctctgaggccatctgattctaggagactctgcctcgttgaggatattttgaggcctaactacacattcctgcccccagagaggtcacagcctatagcaggctgatgtttctcatgtcacatggcacagaaaggcacattttcgttctcaggctaacaaagagcttcaaaaactattagaagggacagtggctataagagaagaacctcagtcaatgtgtgaaattaactaggaacctggctcctgtttcttttaggtcatgtttttcagcttaggtaaaactagaggctttgataaagcatgacctctagaaatcattgcttttcataaatggaagtgggtttgagttttttctactgattgttagtgcaggtgatgtctacatgcccccagaacatattccatgcaacaaaaaaagcccaggtcaccgtctttgctgggaacttgacttttgtgctcactgaattttaagctttctgacagcagcctggaatcatggagggataaagtacctattagtaagatggaaaaaggtgtttcaggttggagctgcagtctgttgagagtaagctatgggaaggcctgtatacgaggggtggacttttcttctgtaagtgtccagagaccaggcctcctgaagagggcatgggggcttaacttacctggactactgtgtttacaatactcatttatcttgaactcctcctaacccctgagaattgctacatttagtatttgctgagtacttcctagcatcctagggaatcaatagaacattctcccaaccaggctgggtgcggtggctcatgtctgtaatcccagcactttgggaggccaaggtaggcagatcccttgaggccaggagtgcaagactagcctggctgacatggtgaaaccccgtctttactaaaaatacaaaagttagccaggcatggtggtacacacctgtaatcccagctacatgggaggagtaggaggcaggagaattgcttgaacctgggaggtggaggttgctgtgagccgagatcatgccactgcactccagcctgggcgacagagtgagtgagactctgtttaaaaaaaaaaaaaaaaagaacattctcctaacctggcttcttcctccaggggtgtaattaatcatgtcagtttcctcattgatacacacacacacacactacaatcctgtatccattacttttcaaggtacatttactatttacgtttggggtccttgtctcttttttaatagtgtttcttaaagtcttgtattatatcagagtacagtaacatcccagtcaagagcactctagtaagctctaggaggaaagcgacttccggaaggcagtggagacctgtcctgttggggcagcataggggcagcccctgcctctggtcagttctggcgctcaggctcagggttgcctctgggctgttcttcccagagactgacaaagggctcccataaggcacctgcagagcctgtgagaagctgaagtcaatgttttcctgacaccagttgatctgtgcaggatccattgatttaaccacctgctgtgtggcatgcactgtggtcgatgccaggaacaggaattggaggggcccatgagcatggccagtatcacaggctggaggtgctgctgcgctctgaccgggcctcttggggatgagcccatgtcaaccaccttgcctccgatggggtcgggcccacaggttacctttgtgtgtccatgaccacaccttcctccccgacctcatccaaatctctttcttttccaagcccctgaatccttcagggctgcaggttttgtttaaagcagagctggtgagttgcataggttgttgcattgggactagatggggtgttcaaagagttgggagttaaaaaacataaagggtatttattaggagaaccaaggagtgtaattctcctgttcttaatatgcggccaggttaatgaatgtcacgtgaatgaaccagaaaaaaatgaagtgtgcccttgatcagctgggttggtgtgcagcaagctgtgtgaccaggggacagcagtggtcctgagggccgtcactgtctgccgtgcagagcccttcctcccacgggggcctacctcacctgtgccaagggcttgtctgtggtcagtgacctggatagatctgaatggggcttctttttcgaggagtcttatggcaggtctctcagtaaagactccattcttgatgatcacacattttggattttccaaatctgtcagagaatgggcttgaggcggggtttgtgggcactagtttcactggtttcatttaccaaaaaggggagcagaagtcaagtatggtggctcatccctgtaatcccagaggcaagagaattgcttgagcccaggagttcgagaccagcctgagcaacataaggagaccccgtctccacaaaaatgaaaaataacattttagtcagacgtggtggcatgcatctgtggtcccagctgcttgggagggtgagatgggagggttgtttgagccctggagttaaagttgcaatgagctgtgattgcaccactgcactctagcctgggtgacagaacgagaccctgtctcaaaaaaaaaaaaaaagaaagaaagaaaggaaaaaaaaaactcatgcctgtaatcccagcactttggggaccggggtgggcagatcacgaggtcaggagatcaagactatcctggccaacatggtgaaaccccgtttctactaaaaatacaaaaattagccaggtgtggtggcacgtgcctgtaatcccagttactcgggaggctgaggcaggagaatcgcttgaaccagggagtcagaggttgcagtgagctgagatcgtgccactgtactccagcctgggcgacagagtgagactctgtctcaaaccaaaaaaaaggggtggggggcgggggcaggagaacagtgagaggtagggagaggaaaggggattctcgctacacccaaaccagataccatctagaggctagaatctttgggaggctcaaattccctagaaagcaggagaagcttctgtagccctcccgctttcccagtagattaagcccagggcggctccagatgtgtgacatgctctgtgcccaaccagagcccatcataggcagaggaataacacccacaccagaagggccctcggaggtcaccacgtccaagaaccctctttacagatgaggaaactgaggcccagagaggggagagccacctagcgagctggtggcggctagaccaggagagctgtcattccaagcaagcaaaggcaacgagacgagcccagagctgtgctcccatctctttgttagggggcctgggatgccctctcagtgtcattttgtccaggatgatgctccctctcttaagcgattaatgcgcccttgctaaccttttgctatcgctgcctcttcaaaccagaggagttgagagttccgggccggcagaggaaggcgcctgaaaggcccctggccaatgagattagcgcccacgtccagcctggaccctgcggagaggcctctggggtctctgggccgtgcctcggggagaaagagccagaagctcccgtcccgctgaccgcgagccttcctcagcaccgtcccgtttgcccagcgcctcctccaacaggaggccctcaggagccctccctggagtggggacaaaaaggcggggactgggccgagaagggtccggcctttccgaagcccgccaccactgcgtatctccacacagagcctgaaagtggtaaggtggtccaggaaggcttcctccgagagccaggccccccaggtctgagccaccagctcatgtccggcatgcctggggctcccctcctgcctgagggccccagagaggccacacgccaaccttcggggacaggacctgaggacacagagggcggccgccacgcccctgagctgctcaagcaccagcttctaggagacctgcaccaggaggggccgccgctgaagggggcagggggcaaagagaggccggggagcaaggaggaggtggatgaagaccgcgacgtcgatgagtcctccccccaagactcccctccctccaaggcctccccagcccaagatgggcggcctccccagacagccgccagagaagccaccagcatcccaggcttcccagcggagggtgccatccccctccctgtggatttcctctccaaagtttccacagagatcccagcctcagagcccgacgggcccagtgtagggcgggccaaagggcaggatgcccccctggagttcacgtttcacgtggaaatcacacccaacgtgcagaaggagcaggcgcactcggaggagcatttgggaagggctgcatttccaggggcccctggagaggggccagaggcccggggcccctctttgggagaggacacaaaagaggctgaccttccagagccctctgaaaagcagcctgctgctgctccgcgggggaagcccgtcagccgggtccctcaactcaaaggtctgtgtcttgagcttcttcgctccttccctggggacctcccaggcctcccaggctgcgggcactgccactgagcttccaggcctcccgactcctgctgcttctgacgttcctaggacgccactaaatcgacacctgggtgcagctgctccactccctcggcctcctcccgtgctcaggctgtggccgcacgcgcccctcacgcttgcccgccactctgcatgtcaccagcacccccgctccgtgctacccaccttgtttgactctctggccacttgatttgtccacaacggcccatcagcccacaggaggtttggtgggtgccttccaccgacaggatgacgggtgccctcatggtgtctagaactctccaaccctcccatgtaggcataagcagccccactttgcagatgaggaaacggaggctcagagaagtacagtaacttgccgaaggccaatgagtagtaagtgacagagccaggtttgggatccaggtaggttgtctctgaaagacacgcctgtcctgcatcccacaacgcctcccaggaggtgctggagtgtggacgcctaacacagagatgtgcagggcacacacagcaggtgacacacacagcatccagaggtggcccagagctcatgctgtgcctttggcccagtgccctgcccccacccactctgccttgtggcaggaagacaaggagcagacacaagatctccctggtccacatgccaccacctccctctgcagaggacaaggggatcctcatgctggcattggagggggttgagcagggcccaccttgagccctcaggagcacgaccacagcagccctgcagggagggattggtgggaggagagtcccaagtatcagggagaggagagttggtgtcccacaggagacctcagagccacaaggcgagcttgttcataaatttgggacccttagcatttcacagttatttgcagagcccagaaatggatgttactgaagctcacagttgcaagcatctgttaaatttttattagattttacttttagggaaaactttgaaatgctataaagaagcctgtgtttaaaagttaagacagaggctgggggcgatggctcacgcctgtaatctcagcactttgggaggccaaggcaggtggatcatttgaggttaggagttcgagaccagcctggccaacatggtgagaccctgtctctactaaaattacaaaaaattagctgggcgtggtggcgggcacctgtagtcccagctactggggaggctgaagcaggataagtgcttgaacccaggaggcagaggttacagtgagccaagatcacaccactgtaccctaagcctgggcgacagagtgagactctgtctcaaaaaataaaataaaataaagttaagagagaaaaaaatatatcctatatcctttgttaaattccaaaacagtaggggacaaataactgacttgacaggttactacaatatttcctgaaatgatgttttcttgaatactggcctactagaggttcataggtgtgtttggattaaaaaagagttccatggcccagtgactgggggaaaaaaataaaagactaaagtaagttaaacaggcttttctgctgcaggacttgtcagagcctttaatgtactaatggccattgtgaccctctgagaaggtcacagagtgggtttcccaaacttacttgattctacctgctaacatttcctggaggaagtttgggaaatgccgatttagcagattcttttgttgtgccgtggatggtgctggttgatgtgggcaaaacaaagaacacgtgagtcagatccgcctggggctcttactaaagtgcaggttcccaggtgccactttaggcttacagacccagttgtggggtaagcctgggagtcttttagcaggtgattctgccacatagtatagttggaaaacctctgggcatactcattgctggtccctctagaaatccaggtgacaatagccaatgagaagctccaagagacccagttgtccatggggtagagggaatgtgatattgaaaccaaagaagaaaatctatgatcagttttcagcagtgactgtcaagagaaggagaagggtgagttagcgctgatgctggctgacaggtcagcgggttggtttcaccaaggagtgtgatgaaggctgatgttgtctgtgggaatgtatgatggtaactggtttgtagctaatttggggaagcagtgagaattcgtgccctttgaagaccagtaagtggcaagaaacccaccaggcctggctcagggctgggctgggcttggctcgtctcagagcagctggggctggtggccaaagccaccattagtgaggggcaggccctgggggtacaaccagcaactaggggacaaagacaaccctgccagcctctcctattctggaggcgtgtgaccagaaatggagatgggttggtcagcataagatggccaggaaggtggaaatcaggactgctggcaatctagccacatgggcaggggagccgggtggttccaggcagtttccaaggccaagagggtgagcaggcacctcacagggaatcagggccaagcctggctgcagtgtggagacaatgcacccacccccatccttggatcttgcaggaggctgggtcctcactgagctaccaacatccatggccctgaggcttttaaaacacccatccatggagtggggctggtcccagtggggtgaggctgaccctggcagaaacagggcaggagcctgtgggttagggagactgcaccttccttagatagcctccatgccatcatgtccccgtgacagtttctgctgcgtcccctctgcatggtcccaccctcggccagcctgctgccccctcttgccaggttgcgctaatcagtgaccccagtgtgctgtgttgatactaacaatgcgaggcctagcagattcaagggaaaagagaaccaactgggtttccaccagacccaactaaacaaacatggacctatcccagagaaatccagcttcaccacagctggctttctgtgaacagtgaaaatggagtgtgacaagcattcttattttatattttatcagctcgcatggtcagtaaaagcaaagacgggactggaagcgatgacaaaaaagccaaggtaagctgacgatgccacggagctctgcagctggtcaagtttacagagaagctgtgctttatgtctgattcattctcatatataatgtggggagtatttgtcactaaagtacagctgtcatttaaagtgctttgtattttggggcaggcttttaaaaagtccagcatttattagttttgatacttaccccagggaagagcagttggcaggttcatgaagtcatgctcctaattccagctttcttagtgtactttcagtgagaccctgacagtaaatgaaggtgtgtttgaaaaccaaacccaggacagtaaatgaaggtgtgtttgaaaaccagccctaggacagtaaatgaagccatcttctcactgcataaactgcacccagatcttcgcccatccttctcagtatttcacttcacccattgtttactgtctcaatgactggggaaatgtctggggaaatgctcccgtaattgcacagtggcgtttttcctggaaaatcccaccatggctctagataagacctatttttcttaaaggtatctaaaatttccagcataaattctgtctgaaacacctgaattttaatcagtactggagcccggagggcatctccagttgccacatagctctgagcattcagtggtgtgttgagggctgctcccggaagtgcctgcagagtcagggctccccagcctcatctagtgaggcagtggaagggcctgtggggatttggagagctggcctgggtctctgaagtgatagtgacagctgcttgtcaatcacggtgcacatttagtgctgggggcagggggcagggaataccagcctcatgcatgcatgcattcatttgttccttccttcattcattcattcagtacacatgggtacaacatccctgccctggagttgcccagagtctagggaggggaaagatctattaccctgggcctcggccagctggggagtgctgctggtggagaggggccgtgtgcagcgagggaaggaggagtcgtcaatacccccaccccagctttgctttcttgtcatcagccccagggccccagcctgtgtccctcctctcccattgctacttcatctcctgggtcctccttaccaagcctgaccacacagagggccttggccgcttccatggggaattggaaagcaataagatagcatcccctagaagcccagtgaagtctgggacaggacccttctctgagctctgacttgctcttggaaacacttcgaggcttagcctccccactttgtttcccgagagtgtgacctgttcccctccaaacacccccttctcctccagggccatgcccacccgtcaaaatcccccacgggcaggacgaactgtgggtgtcagtcaccatctatcctgcatcctggttccagggccccccccagccccgcctccatagggacaggcgtgcagacacccgtccctggctgcttcctcttgtggaatgggttcaaaagtaagcagtgttgtttacactgacaaactgaaaaaaaaagaaaaagagataacattggaggcttggcacagtggctcatgcctgtaatcccagcactttgggaggctaaggtgggaggatgtccccagcccaagagttctagaccagcctgggcaacatagcaagaccccatctcaaaaaaaaaatttaattggccaggcagaggtgggaggatcacttgaacccaaagggtggaggctgcagtgagccgtgatggcaccactgcactccagccagggcaacagagggagaccctgtctctaaaacaaacaaacaaacaaacaaacaaaagagttaacattggccagattaggattcaccagatagtgttaatattagtttgatttgagactttaatcagaaagcacatgtgtggtgggggtgggtgtaacctaagtcaggtagaatctttccaacttggggggggcacactcctgattgtagccatatgagtctgtcagtgtggtggaagaggccatgggttaatgggcaggtaaaaaagcaccttgcctggaattgagtagaaagtaaggcccttcagaccccgtgacacacttggggacattttcttgagtaacatcctaagattcatgtaccttgatgatctccatcaacttactcatgtgaagcacctttaaaccagtcgtctccaaattcaggggcacagtaacatccaacaggctggagaaagaacgtactagaacttccattcctttttcatgtcctcttctaaaagctttgtcagggccaggcgcggtggctcacgcctgtaatcccagcactttgggaggccgagacgggtggatcacgaggtcaggagatcgagaccatcctggctaacacagtgaaaccccatctctactaaaaatacaaaaaaacgagccgggcgtggtggtgggcgcctgtagtcccagctactcgggaggctgaggcaggagaatggcgtgaacccaggaggcagagcttgcagtgagccgagattgcaccactgcagtccagcctgggcgacagagcgagactccgtctcaaaaaagaaaaagaaaaagaaaaagaactgtgattggggaggacggtcactttcctgttcttactgatcagaagggatattaagggtacctgattcaaacagcctggagatcactgctttcaaccattacctgccttatttatttttagttactgtccttttttcagtttgtttccctcctccatgtgctgacttttattttgattttatttatgtttatgtttaagacatccacacgttcctctgctaaaaccttgaaaaataggccttgccttagccccaaacaccccactcctggtagctcagaccctctgatccaaccctccagccctgctgtgtgcccagagccaccttcctctcctaaatacgtctcttctgtcacttcccgaactggcagttctggagcaaaggagatgaaactcaaggtaaggaaaccacctttgaaaagaaccaggctgctctgctgtggtttgcaaatgtggggtttgtttatttgttttttagcctcaaagacctttcttcaaatgagttctggcatagaagcaccgtgtaaaatagttagaattctgggcaaaggggaaaagagagctgggggccatccctctcagcaccccacaggctctcatagcagcagctcctaagacacctggtgggaccttggtttcgaaatcgctactctaaggctgggcacggtggctcacacctgtaatcccagctctttaggaggccgaggagggtggatcacctgagatcaggagttcgagaccagcctggctaacatggcaaaaccctgtctctactaaaaatacaaaaattagccgggcgtggtggtatgcgtggtggtaatcgcagctactcgggaggctgaggcacaaggattgcttgaaccccagaggcagaggttgtagttagctccagcttgggcgacagagcaagaccctgtcgcaaaaattgtttaaaaaacaaacccaaaattgctactctcattgggttcctttgcccattcctgattttggcaagagaaatgcttccagattgccctgatctgggtaggacagcatcacgccatagcaacactgccccgtgagctcactgccccctcaactagcttgtggtccttggttaatgtcagtttcttttttgagtttgtgttatgtctaagggtcatctgctgggtaacggaacccagggactgccctagtccctagactgtgccatgcccgactctgccagctttgtcagtgatgctggtgctcgcctcctcgggtgctcgcctggtctgagcacacccaaggagttcttgaggccttagggttgtttgcgagagaatgaaagaacacgacctagctctctttagcatccttggtcaggttcaacactgcccccaggggcctctggtggagccaaccaccatcagccaaataaatccataattagagtcagaaaatggatgtctgcatatgtgtagtgcactaatgtcctgccgatgattgacatggagtggagagtgacctgatcattgctgtgagctctgctggccttggcacaactcatgctgataactaatgcacacagttcctctgggaggaaatgtcctcagggaacttggagtttgggtggggatgtgggtttgtgtgcccagcaagcccttgtggttgtagcagacactagtggcatctaggaggcaaagggtcaccccagtcttagccacgttttgagtcaaggtggcggagtggggctggtgttgactcttggtggcagtaacttttcccaatggtgaaaaacccctctatcatgtttcatttacagggggctgatggtaaaacgaagatcgccacaccgcggggagcagcccctccaggccagaagggccaggccaacgccaccaggattccagcaaaaaccccgcccgctccaaagacaccacccagctctggtaagaagaacgttctcttgaatcttagaggaagctgaagctctcagaggtacagccttcattttaggaggccttaggccactgagaatgaataacccctggcagctggtcagcagcttgcagtttactaagcactggagtcttcattgccttctcagtccttttgatttctgaggcaaatgttgaatccctacctttttttttttttttcttttgagacagagtttcgcttttgttatccaggccggagtgcagtggtgtgatctcagctcactgcatcctccacctcccaggttcaagcgattctcctacctcagcctccctagtagctgggattacaggcacctgccactatgcccggctaattttttgtatttttagtagagacagggtttcaccatgttggccaggctggtctcgaacgcctgacctcaggtgatccacctgcctcggcctcccaaagtgctgggattacaggcatgagccaccactcccagcctgaatcctcactttttatcaatgaagaaattgaggctgattctgcagcatgataaaaaaaaatacagaaaaaggaaaaaaaagaaagaaatcgagcctctgagagtttgcttgactgagtctaaccagctcattttaaacccgaggaaaatgcagtcacatgactactaagtggcagctctcggagcctctctggccccaagtccagggttccatagaggcagccccagcatggcatgttttcagtccccaaatgagactctggagacaaatgtctctggagacagagcagcagcctggataagtcacaatgggtgacgtcactcagggctcaacccctgggcagcttaacttgctagggacgttaggagtctgctgcaaaacctgagggtcttagctgagcagtcacaggctgggcccgttgccctgggctcctgtgagtaaaacccagtcaattttgagtacccagtaaggcatccattgagttattttgcagccaggagtgctattaagaacagtcgcggctgggcgtggtggctcatgcctgtaatcccagcactttgggaggccaaggtgggcggatcacctgaggtcaggagttcgagaccagcttggccaacatggcaaaaccccgtctctaataaaaatacaaaataattagctgggcgtggtggcgggcgcctgtaatcccagcttctcaggagggtgaggaaggagaatcacttgaacccaggaggcagaggttgcagtgagctgagatcgcaccattgcactccagcctggatgacaaaagtgagattccttctcaaaaaaaaaaaaaaaaaaacagtcgtcctctttggggattagggacagcctgcctgcctgcccgagcacttctctcttccattgccccagtgaagtattccaggcccctgggtttagactctgcaccatgtaggggtgtctgacctgcacttgctccttggtggcacgggcagcctatggcacttgctgcgggctgtgaccaaagcctggcctggatcttggatcttggtgactctgcttctccctggcctgagggagctgcccagagcctgcccaccacctgctgcgtgtctttgcggtggcatttctcgcacacatgccgtgcagtggcacccccaaggatggccattcactaaggcccattgtttttgtcttttcgcttcgtgttttctggcctggtgtttttctcatatacatgtgatccagggataattcccagaattttgacaggattttaagtagcgtttggatcctgctgtttttttttcacttaacatcgggccagttgactcacactctgttttttgttgttgtttttttgagacggagtctcactgtgtcacccaggctgaagtgcagtggcacaatcttggcatactgcaacctctgcttcccaaattcaagcagttttcctgcctcagcctcctgagtagctgggactacaggcacaggccaccacgccctgctaatttttgtatttttagtaaagacagggtttcaccattttggccagcctagtctcgaactcctgacctcaagtgatccgcccacctcggcctcccaaagtgctgggattacaggggactcacactttgtaacaacctgaaacaacgtgatgcatttccctttgggtcttacctgctcttcggtggctgcctgcaggtggagagaccctcccccttgggcccctcgaccttgtttcagaatggggcccctgctgggccagctgtgggtgcctgccacgtgaaggactcattaaggccctgtttaagcctgatgataataaggctttcgtggatttttctctttaagcgactaagcaagtccagagaagaccaccccctgcagggcccagatctgagagaggtactcgggagcctacttcgctgggagcagcctccctttgcgtgtgtggccattcactggcttgtgtttctagagccgggaggacccttttctgcaatgcagggttcacacagggttcgcagcctgaagatggagcagtccgaattctcttccctgtgcagtttgcgcagctgtgtttgtctgatgggctttctaatcctgtgtgctctccttgacttcagggacaatggcattacaggcatgagccaccatgcctggctgtctccctatgtttcagatgaagacataggcttaaggaggtcaggtgacttgcccacgaccactctgtaaataagaggcatgaaaagtatttggagccaccaccaccaagcccactggtcaccctgggtctctgaagtcagggaggcaggaggatgggaggtctgaggaggcagagaggctgagcctggaggccctggaggccgaggccccatctgttgtttccttatgtggaaaataagaggcttcgtttgtcctattgccacagagcgtactacttcaggaacatccaagacatggaaatccgcagggcacggtggctcacgtctataatcccggcactttgggaggttgaggtgggagaatcgcttgaggccagaagttcaagaccagcctgagcaacatagtcagaccccgtctctataaaaaacattatttttaaaaaagacatggaagtcaaattctaaaaactggtgctggctgggtgcggtggctcatgcctataatcccagcactttgggaggccgaggcgggtggatcacctgaggtcaggagttcaagaccagcctggccaacatggtaaaacctctactaaagaaatctttactgaaaatacaaaaatccagtctctactaaaataagtctctactaaaaatacaaaaattagccaggcgtggtgctgcacacctgtaatatcagctactcgggaggctgaggcaggagactcgcttgatcccatgcagcggaggttgcagtgagccgagatcacgccattgcactccagcctgggcatcagaataagactccgtctcaaaaaaaaaaccacaaaaaaacaaaacaacaacaaaagaaaactagtgcttattcgtcactggccaagctgcccattggctacatgggtgcttcaaagagctgcccttctccaggtctggccagcaggtatgtgttacagcaaatgcctggggcagcggcaggggcattgctgcgggaagcttctggacttgcaggaaagctaagttctcagactgcaggggagctaagcacacctcggcacagggtgaggcctgcggttctcagacttcagtctttgtggagcttgagaaaaatgaggctttgcaggtcccacccctagagattctgctctatccactcttgaaggggatcgagaaatttgcattttgcaactcccactttcctccttgaaagctccggagattctgacgcagggttccgtgggccacactttggaaaatacagacccatgagatagaataccagactgttgaagtgtaacgggggcctgggaagtgcagtaacagaagcaagtttgagggtaaaggacacccagaggagggagggacagcatctgcatggagaggagaagagaccccccagcagcttccagggtgttggaagggtgcgctagtaactgctatgcatggcaggtggggaactgtacgtcagggcacagcagcatgaagcggtatggctcgtgtggacagctagggacaggcaggcgtggagcaggcatcctgttctgaaggccaaatcccacagaggagccagggtgctggcaggagccctgaactagccgaacagctgaacagctgaacattcaccctgtggggaaagggtcagaagcgtccaggcttgagggcacagctgggtctcgtcactgcatcacccttatttaggataaaggccctgaagaattgtattagaggttggcaaagcatatctaccacctcctggagccacgctggccgcagggattataattatttccattttcaaattaaggcctctgagctcagagaggggaagttacttgtctgaggccacacagcttgttggagcccatctcttgacccaaagactgtggagccgagttggccacctctctgggagcgggtattggatggtggttgatggttttccattgctttcctgggaaaggggtgtctctgtccctaagcaaaaaggcagggaggaagagatgcttccccagggcagccgtctgctgtagctgcgcttccaacctggcttccacctgcctaacccagtggtgagcctgggaatggacccacgggacaggcagcccccagggccttttctgaccccacccactcgagtcctggcttcactcccttccttccttcccaggtgaacctccaaaatcaggggatcgcagcggctacagcagccccggctccccaggcactcccggcagccgctcccgcaccccgtcccttccaaccccacccacccgggagcccaagaaggtggcagtggtccgtactccacccaagtcgccgtcttccgccaagagccgcctgcagacagcccccgtgcccatgccagacctgaagaatgtcaagtccaagatcggctccactgagaacctgaagcaccagccgggaggcgggaaggtgagagtggctggctgcgcgtggaggtgtggggggctgcgcctggaggggtagggctgtgcctggaagggtagggctgcgcctggaggtgcgcggttgagcgtggagtcgtgggactgtgcatggaggtgtggggctccccgcacctgagcacccccgcataacaccccagtcccctctggaccctcttcaaggaagttcagttctttattgggctctccactacactgtgagtgccctcctcaggcgagagaacgttctggctcttctcttgccccttcagcccctgttaatcggacagagatggcagggctgtgtctccacggccggaggctctcatagtcagggcacccacagcggttccccacctgccttctgggcagaatacactgccacccataggtcagcatctccactcgtgggccatctgcttaggttgggttcctctggattctggggagattgggggttctgttttgatcagctgattcttctgggagcaagtgggtgctcgcgagctctccagcttcctaaaggtggagaagcacagacttcgggggcctggcctggatccctttccccattcctgtccctgtgcccctcgtctgggtgcgttagggctgacatacaaagcaccacagtgaaagaacagcagtatgcctcctcactagccaggtgtgggcgggtgggtttcttccaaggcctctctgtggccgtgggtagccacctctgtcctgcaccgctgcagtcttccctctgtgtgtgctcctggtagctctgcgcatgctcatcttcttataagaacaccatggcagctgggcgtagtggctcacgcctataatcccagcactttgggaggctgaggcaggcagatcacgaggtcaggagttcgagaccaacctgaccaacagggtgaaacctcgtctctactaaaaatacaaaaatacctgggcgtggtggtggtgcgcgcctataatcccagctactcaggaggctgaggcaggagaatcgcttgaacccaggaggcagaggttgcagtgagccgagatagtgccactgcactccagtttgagcaacagagcgagactctgtctcaaaacaaaataaaacaaaccaaaaaaacccaccatggcttagggcccagcctgatgacctcatttttcacttagtcacctctctaaaggccctgtctccaaatagagtcacattctaaggtacgggggtgttggggaggggggttagggcttcaacatgtgaatttgcggggaccacaattcagcccaggaccccgctcccgccacccagcactggggagctggggaagggtgaagaggaggctgggggtgagaaggaccacagctcactctgaggctgcagatgtgctgggccttctgggcactgggcctcggggagctagggggctttctggaaccctgggcctgcgtgtcagcttgcctcccccacgcaggcgctctccacaccattgaagttcttatcacttgggtctgagcctggggcatttggacggagggtggccaccagtgcacatgggcaccttgcctcaaaccctgccacctccccccacccaggatcccccctgcccccgaacaagcttgtgagtgcagtgtcacatcccatcgggatggaaatggacggtcgggttaaaagggacgcatgtgtagaccctgcctctgtgcatcaggcctcttttgagagtccctgcgtgccaggcggtgcacagaggtggagaagactcggctgtgccccagagcacctcctctcatcgaggaaaggacagacagtggctcccctgtggctgtggggacaagggcagagctccctggaacacaggagggagggaaggaagagaacatctcagaatctccctcctgatggcaaacgatccgggttaaattaaggtccggccttttcctgctcaggcatgtggagcttgtagtggaagaggctctctggaccctcatccaccacagtggcctggttagagaccttggggaaataactcacaggtgacccagggcctctgtcctgtaccgcagctgagggaaactgtcctgcgcttccactggggacaatgcgctccctcgtctccagactttccagtcctcattcggttctcgaaagtcgcctccagaagccccatcttgggaccaccgtgactttcattctccagggtgcctggccttggtgctgcccaagaccccagaggggccctcactggcctttcctgccttttctcccattgcccacccatgcacccccatcctgctccagcacccagactgccatccaggatctcctcaagtcacataacaagcagcacccacaaggtgctcccttccccctagcctgaatctgctgctccccgtctggggttccccgcccatgcacctctgggggcccctgggttctgccataccctgccctgtgtcccatggtggggaatgtccttctctccttatctcttcccttcccttaaatccaagttcagttgccatctcctccaggaagtcttcctggattcccctctctcttcttaaagcccctgtaaactctgaccacactgagcatgtgtctgctgctccctagtctgggccatgagtgagggtggaggccaagtctcatgcatttttgcagcccccacaagactgtgcaggtggccggccctcattgaatgcggggttaatttaactcagcctctgtgtgagtggatgattcaggttgccagagacagaaccctcagcttagcatgggaagtagcttccctgttgaccctgagttcatctgaggttggcttggaaggtgtgggcaccatttggcccagttcttacagctctgaagagagcagcaggaatggggctgagcagggaagacaactttccattgaaggcccctttcagggccagaactgtccctcccaccctgcagctgccctgcctctgcccatgaggggtgagagtcaggcgacctcatgccaagtgtagaaaggggcagatgggagccccaggttatgacgtcaccatgctgggtggaggcagcacgtccaaatctactaaagggttaaaggagaaagggtgacttgacttttcttgagatattttgggggacgaagtgtggaaaagtggcagaggacacagtcacagcctcccttaaatgccaggaaagcctagaaaaattgtctgaaactaaacctcagccataacaaagaccaacacatgaatctccaggaaaaaagaaaaagaaaaatgtcatacagggtccatgcacaagagcctttaaaatgacccgctgaagggtgtcaggcctcctcctcctggactggcctgaaggctccacgagcttttgctgagacctttgggtccctgtggcctcatgtagtacccagtatgcagtaagtgctcaataaatgtttggctacaaaagaggcaaagctggcggagtctgaagaatccctcaaccgtgccggaacagatgctaacaccaaagggaaaagagcaggagccaagtcacgtttgggaacctgcagaggctgaaaactgccgcagattgctgcaaatcattgggggaaaaacggaaaacgtctgttttcccctttgtgcttttctctgttttcttctttgtgcttttctctgttttcaggatttgctacagtgaacatagattgctttggggccccaaatggaattattttgaaaggaaaatgcagataatcaggtggccgcactggagcaccagctgggtaggggtagagattgcaggcaaggaggaggagctgggtggggtgccaggcaggaagagcccgtaggccccgccgatcttgtgggagtcgtgggtggcagtgttccctccagactgtaaaagggagcacctggcgggaagagggaattcttttaaacatcattccagtgcccgagcctcctggacctgttgtcatcttgaggtgggcctcccctgggtgactctagtgtgcagcctggctgagactcagtggccctgggttcttactgctgacacctaccctcaacctcaaccactgcggcctcctgtgcaccctgatccagtggctcattttccactttcagtcccagctctatccctatttgcagtttccaagtgcctggtcctcagtcagctcagacccagccaggccagcccctggttcccacatcccctttgccaagctcatccccgccctgtttggcctgcgggagtgggagtgtgtccagacacagagacaaaggaccagcttttaaaacattttgttggggccaggtgtggtggctcacacctaatcccaacacctggggaggccaaggcagaaggatcacttgagtccaggagttcaagaccagcctgggcaacatagggagaccctgtctctacaattttttttttaattagctgggcctgttggcactctcctgtagttccagctactctagaggctgaggtgggaggactgcttgagcctgggaggtcagggctgcaatgagccatgttcacaccactgaacgccagcctgggcgagaccctgtatcaaaaaagtaaagtaaaatgaatcctgtacgttatattaaggtgccccaaattgtacttagaaggatttcatagttttaaatacttttgttatttaaaaaattaaatgactgcagcatataaattaggttcttaatggaggggaaaaagagtacaagaaaagaaataagaatctagaaacaaagataagagcagaaataaaccagaaaacacaaccttgcactcctaacttaaaaaaaaaaatgaagaaaacacaaccagtaaaacaacatataacagcattaagagctggctcctggctgggcgcggtggcgcatgcctgtaatcccaacactttgggaggccgatgctggaggatcacttgagaccaggagttcaaggttgcagtgagctatgatcataccactacaccctagcctgggcaacacagtgagactgagactctattaaaaaaaaaatgctggttccttccttatttcattcctttattcattcattcagacaacatttatggggcacttctgagcaccaggctctgtgctaagagcttttgcccccagggtccaggccaggggacaggggcaggtgagcagagaaacagggccagtcacagcagcaggaggaatgtaggatggagagcttggccaggcaaggacatgcagggggagcagcctgcacaagtcagcaagccagagaagacaggcagacccttgtttgggacctgttcagtggcctttgaaaggacagcccccacccggagtgctgggtgcaggagctgaaggaggatagtggaacactgcaacgtggagctcttcagagcaaaagcaaaataaacaactggaggcagctggggcagcagagggtgtgtgttcagcactaaggggtgtgaagcttgagcgctaggagagttcacactggcagaagagaggttggggcagctgcaagcctctggacatcgcccgacaggacagagggtggtggacggtggccctgaagagaggctcagttcagctggcagtggccgtgggagtgctgaagcaggcaggctgtcggcatctgctggggacggttaagcaggggtgagggcccagcctcagcagcccttcttggggggtcgctgggaaacatagaggagaactgaagaagcagggagtcccagggtccatgcagggcgagagagaagttgctcatgtggggcccaggctgcaggatcaggagaactggggaccctgtgactgccagcggggagaagggggtgtgcaggatcatgcccagggaagggcccaggggcccaagcatgggggggcctggttggctctgagaagatggagctaaagtcactttctcggaggatgtccaggccaatagttgggatgtgaagacgtgaagcagcacagagcctggaagcccaggatggacagaaacctacctgagcagtggggctttgaaagccttggggcggggggtgcaatattcaagatggccacaagatggcaatagaatgctgtaactttcttggttctgggccgcagcctgggtggctgcttccttccctgtgtgtattgatttgtttctcttttttgagacagagtcttgctgggttgcccaggctggagtgcagtggtgcgatcatagctcactgcagccttgaagtcctgagctcaagagatccttccacctcagcctcctgagtagttgggaccacaggcttgcaccacagtgcccaactaatttcttatattttttgtagagatggggtttcactgtgtcgcccaggatggtcttgaactcctgggctcaagtgatcctcctgcctcagcctcgcaaattgctgggattacaggtgtgagccaccatgcccgaccttctctttttaagggcgtgtgtgtgtgtgtgtgtgtgtgggcgcactctcgtcttcaccttcccccagccttgctctgtctctacccagtcacctctgcccatctctccgatctgtttctctctccttttacccctctttcctccctcctcatacaccactgaccattatagagaactgagtattctaaaaatacattttatttatttattttgagacagagtctcactctgtcacccaggctggagtgcagtggtgcaatctcggctcactgcaacctccgcctcccaggttgaagcaactctcctgcctcagcctccctagtagctgggattacaagcacacaccaccatgcctagcaaatttttatatttttagtagaggaggggtgtcaccatgtttgccaagctggtctcaaactcctggcctcaggtgatctgcctaccttggtctcccaaagtgctgggattacaggtgtgagccaccacgcctgcccttaaaaatacattatatttaatagcaaagccccagttgtcactttaaaaagcatctatgtagaacatttatgtggaataaatacagtgaatttgtacgtggaatcgtttgcctctcctcaatcagggccagggatgcaggtgagcttgggctgagatgtcagaccccacagtaagtggggggcagagccaggctgggaccctcctctaggacagctctgtaactctgagaccctccaggcatcttttcctgtacctcagtgcttctgaaaaatctgtgtgaatcaaatcattttaaaggagcttgggttcatcactgtttaaaggacagtgtaaataattctgaaggtgactctaccctgttatttgatctcttctttggccagctgacttaacaggacatagacaggttttcctgtgtcagttcctaagctgatcaccttggacttgaagaggaggcttgtgtgggcatccagtgcccaccccgggttaaactcccagcagagtattgcactgggcttgctgagcctggtgaggcaaagcacagcacagcgagcaccaggcagtgctggagacaggccaagtctgggccagcctgggagccaactgtgaggcacggacggggctgtggggctgtggggctgcaggcttggggccagggagggagggctgggctctttggaacagccttgagagaactgaacccaaacaaaaccagatcaaggtctagtgagagcttagggctgctttgggtgctccaggaaattgattaaaccaagtggacacacacccccagccccacctcaccacagcctctccttcagggtcaaactctgaccacagacatttctcccctgactaggagttccctggatcaaaattgggagcttgcaacacatcgttctctcccttgatggtttttgtcagtgtctatccagagctgaagtgtaatatatatgttactgtagctgagaaattaaatttcaggattctgatttcataatgacaaccattcctcttttctctcccttctgtaaatctaagattctataaacggtgttgacttaatgtgacaattggcagtagttcaggtctgctttgtaaatacccttgtgtctattgtaaaatctcacaaaggcttgttgccttttttgtggggttagaacaagaaaaagccacatggaaaaaaaatttcttttttgtttttttgtttgcttgtttttttgagacagagtttcactctgtcgcccaggctggagtgcagtggtgcgatctccgcccactgcaagctccacctcccgggttcatgctattctcctgtctcagcctcccaagtagctgggactgcaggtgcccgccaccacacctggctaatttttttgtatttttagtagagacggggtttcaccgtgttagccaggatggtctcaatctcctgacctcgtcatctgcctgcctcggcctcccaaagtgctgagattacaggcgtgagccaccgtgcccggccagaaaaaaacatttctaagtatgtggcagatactgaattattgcttaatgtcctttgattcatttgtttaatttctttaatggattagtacagaaaacaaagttctcttccttgaaaaactggtaagttttctttgtcagataaggagagttaaataacccatgacatttccctttttgcctcggcttccaggaagctcaaagttaaatgtaatgatcactcttgtaattatcagtgttgatgcccttcccttcttctaatgttactctttacattttcctgctttattattgtgtgtgttttctaattctaagctgttcccactcctttctgaaagcaggcaaatcttctaagccttatccactgaaaagttatgaataaaaaatgatcgtcaagcctacaggtgctgaggctactccagaggctgaggccagaggaccacttgagcccaggaatttgagacctgggctgggcagcatagcaagactctatctccattaaaactatttttttttatttaaaaaataatccgcaaagaaggagtttatgtgggattccttaaaatcggagggtggcatgaattgattcaaagacttgtgcagagggcgacagtgactccttgagaagcagtgtgagaaagcctgtcccacctccttccgcagctccagcctgggctgaggcactgtcacagtgtctccttgctggcaggagagaatttcaacattcaccaaaaagtagtattgtttttattaggtttatgaggctgtagccttgaggacagcccaggacaactttgttgtcacatagatagcctgtggctacaaactctgagatctagattcttctgtggctgcttctgacctgagaaagttgcggaacctcagcgagcctcacatggcctccttgtccttaacgtggggacggtgggcaagaaaggtgatgtggcactagagatttatccatctctaaaggaggagtggattgtacattgaaacaccagagaaggaattacaaaggaagaatttgagtatctaaaaatgtaggtcaggcgctcctgtgttgattgcagggctattcacaatagccaagatttggaagcaacccaagtgtccatcaacagacaaatggataaagaaaatgtggtgcatatacacaatggaatactattcagccatgaaaaagaatgagaatctgtcatttgaaacaacatggatggaactggaggacattatgttaagtgaaataagccagacagaaggacagacttcacatgttctcacacatttgtgggagctaaaaattaaactcatggagatagagagtagaaggatggttaccagaggctgaggagggtggaggggagcagggagaaagtagggatggttaatgggtacaaaaacgtagttagcatgcatagatctagtattggatagcacagcagggtgacgacagccaacagtaatttatagtacatttaaaaacaactaaaagagtgtaattggactggctaacatggtgaaaccccgtctctactaaaaatacaaaaattagctgggcatggtggctcacgcctgtaatcccagcactttgggaggccgaggcgggccgatcacgaggtcaggagatcgagaccatcctagctaacatggtgaaaccccgtctctactacaaatacaaaaaaaagaaaaaattagccgggcatggtggtgggcgcctgtagtcccagctactcgggaggctgaggcaggagaatggcgtgaacccgggaggcggagcttgcagtgagccgagatcgcgccactgcactccagcctgggcgacaaggcaagattctatctcaaaaaaataaaaataaaataaaataaaataataaaataaaataaaataaaataaaataaataaaataaaataaaatgtataattggaatgtttataacacaagaaatgataaatgcttgaggtgatagataccccattcaccgtgatgtgattattgcacaatgtatgtctgtatctaaatatctcatgtaccccacaagtatatacacctactatgtacccatataaatttaaaattaaaaaattataaaacaaaaataaataagtaaattaaaatgtaggctggacaccgtggttcacgcctgtaatcccagtgctttgtgaggctgaggtgagagaatcacttgagcccaggagtttgagaccggcctgggtgacatagcgagaccccatcatcacaaagaatttttaaaaattagctgggcgtggtagcacataccggtagttccagctacttgggagaccgaggcaggaggattgcttgagcccaggagtttaaggctgcagtgagctacgatggcgccactgcattccagcctgggtgacagagtgagagcttgtctctattttaaaaataataaaaagaataaataaaaataaattaaaatgtaaatatgtgcatgttagaaaaaatacacccatcagcaaaaagggggtaaaggagcgatttcagtcataattggagagatgcagaataagccagcaatgcagtttcttttattttggtcaaaaaaaataagcaaaacaatgttgtaaacacccagtgctggcagcaatgtggtgaggctggctctctcaccagggctcacagggaaaactcatgcaacccttttagaaagccatgtggagagttgtaccgagaggttttagaatatttataactttgacccagaaattctattctaggactctgtgttatgaaaataacccatcatatggaaaaagctcctttcagaaagaggttcatgggaggctgtttgtattttttttttctttgcatcaaatccagctcctgcaggactgtttgtattattgaagtacaaagtggaatcaatacaaatgttggatagcaggggaacaatattcacaaaatggaatgggacatagtattaaacatagtgcttctgatgaccgtagaccatagacaatgcttaggatatgatatcacttcttttgttgttttttgtattttgagacgaagtctcattctgtcacccaggctggagttcagtggcgccatctcagctcactgcaacctccatctcccgggttcaagctattctccttcctcaacctcccgagtagctgggttgcgcaccaccatgcctggctaacttttgtatttttagtacagacggggtttcaccacgttggccaggctgctcttgaactcctgacgtcaggtgatccaccagccttgacctcccaaagtgctaggattacaggagccactgtacccagcctaggatatgatatcacttcttagagcaagatacaaaattgcatgtgcacaataattctaccaagtataggtatacaggggtagttatatataaatgagacttcaaggaaatacaacaaaatgcaatcgtgattgtgttagggtggtaagaaaacggtttttgctttgatgagctctgttttttaaaatcgttatattttctaataaaaatacatagtcttttgaaggaacataaaagattatgaagaaatgagttagatattgattcctattgaagattcagacaagtaaaattaaggggaaaaaaaacgggatgaaccagaagtcaggctggagttccaaccccagatccgacagcccaggctgatggggcctccagggcagtggtttccacccagcattctcaaaagagccactgaggtctcagtgccattttcaagatttcggaagcggcctgggcacggctggtccttcactgggatcaccacttggcaattatttacacctgagacgaataaaaaccagagtgctgagattacaggcatggtggcttacgcttgtaatcggctttgggaagccgaggtgggctgattgcttgagcccaggagtttcaaactatcctggacaacatagcatgacctcgtctctacaaaaaatacaaaaaatttgccaggtgtggtggcatgtgcctgtggtcccagctacttgggaggctgaagtaggagaatcccctgagccctgggaagtcgaggctgcactgagccgtgatggtgtcactgcactccagcctgggtgacaaagtgagaccctatctcacaaagaaaaaaaacaaaacaaaaaacccaaagcacactgtttccactgtttccagagttcctgagaggaaaggtcaccgggtgaggaagacgttctcactgatctggcagagaaaatgtccagtttttccaactccctaaaccatggttttctatttcatagttcttaggcaaattggtaaaaatcatttctcatcaaaacgctgatattttcacacctccctggtgtctgcagaaagaaccttccagaaatgcagtcgtgggagacccatccaggccacccctgcttatggaagagctgagaaaaagccccacgggagcatttgctcagcttccgttacgcacctagtggcattgtgggtgggagagggctggtgggtggatggaaggagaaggcacagcccccccttgcagggacagagccctcgtacagaagggacaccccacatttgtcttccccacaaagcggcctgtgtcctgcctacggggtcagggcttctcaaacctggctgtgtgtcagaatcaccaggggaacttttcaaaactagagagactgaagccagactcctagattctaattctaggtcagggctaggggctgagattgtaaaaatccacaggtgattctgatgcccggcaggcttgagaacagccgcagggagttctctgggaatgtgccggtgggtctagccaggtgtgagtggagatgccggggaacttcctattactcactcgtcagtgtggccgaacacatttttcacttgacctcaggctggtgaacgctcccctctggggttcaggcctcacgatgccatccttttgtgaagtgaggacctgcaatcccagcttcgtaaagcccgctggaaatcactcacacttctgggatgccttcagagcagccctctatcccttcagctcccctgggatgtgactcaacctcccgtcactccccagactgcctctgccaagtccgaaagtggaggcatccttgcgagcaagtaggcgggtccagggtggcgcatgtcactcatcgaaagtggaggcgtccttgcgagcaagcaggcgggtccagggtggcgtgtcactcatccttttttctggctaccaaaggtgcagataattaataagaagctggatcttagcaacgtccagtccaagtgtggctcaaaggataatatcaaacacgtcccgggaggcggcagtgtgagtaccttcacacgtcccatgcgccgtgctgtggcttgaattattaggaagtggtgtgagtgcgtacacttgcgagacactgcatagaataaatccttcttgggctctcaggatctggctgcgacctctgggtgaatgtagcccggctccccacattcccccacacggtccactgttcccagaagccccttcctcatattctaggagggggtgtcccagcatttctgggtcccccagcctgcgcaggctgtgtggacagaatagggcagatgacggaccctctctccggaccctgcctgggaagctgagaatacccatcaaagtctccttccactcatgcccagccctgtccccaggagccccatagcccattggaagttgggctgaaggtggtggcacctgagactgggctgccgcctcctcccccgacacctgggcaggttgacgttgagtggctccactgtggacaggtgacccgtttgttctgatgagcggacaccaaggtcttactgtcctgctcagctgctgctcctacacgttcaaggcaggagccgattcctaagcctccagcttatgcttagcctgcgccaccctctggcagagactccagatgcaaagagccaaaccaaagtgcgacaggtccctctgcccagcgttgaggtgtggcagagaaatgctgcttttggcccttttagatttggctgcctcttgccaggagtggtggctcgtgcctgtaattccagcactttgggagactaaggcgggaggttcgcttgagcccaggagttcaagaccagcctgggcaacaatgagacccctgtgtctacaaaaagaattaaaattagccaggtgtggtggcacgcacctgtagtcccagctacttgggaggctgaggtgggaggattgcctgagtccgggaggcggaagttgcaaggagccatgatcgcgccactgcacttcaacctaggcaacagagtgagactttgtctcaaaaaacaatcatataataattttaaaataaatagatttggcttcctctaaatgtccccggggactccgtgcatcttctgtggagtgtctccgtgagattcgggactcagatcctcaagtgcaactgacccacccgataagctgaggcttcatcatcccctggccggtctatgtcgactgggcacccgaggctcctctcccaccagctctcttggtcagctgaaagcaaactgttaacaccctggggagctggacgtatgagacccttggggtgggaggcgttgatttttgagagcaatcacctggccctggctggcagtaccgggacactgctgtggctccggggtgggctgtctccagaaaatgcctggcctgaggcagccacccgcatccagcccagagggtttattcttgcaatgtgctgctgcttcctgccctgagcacctggatcccggcttctgccctgaggccccttgagtcccacaggtagcaagcgcttgccctgcggctgctgcatggggctaactaacgcttcctcaccagtgtctgctaagtgtctcctctgtctcccacgccctgctctcctgtccccccagtttgtctgctgtgaggggacagaagaggtgtgtgccgcccccacccctgcccgggcccttgttcctgggattgctgttttcagctgtttgagctttgatcctggttctctggcttcctcaaagtgagctcggccagaggaggaaggccatgtgctttctggttgaagtcaagtctggtgccctggtggaggctgtgctgctgaggcggagctggggagagagtgcacacgggctgcgtggccaacccctctgggtagctgatgcccaaagacgctgcagtgcccaggacatctgggacctccctggggcccgcccgtgtgtcccgcgctgtgttcatctgcgggctagcctgtgacccgcgctgtgctcgtctgcgggctagcctgtgtcccgcgctctgcttgtctgcggtctagcctgtgacctggcagagagccaccagatgtcccgggctgagcactgccctctgagcaccttcacaggaagcccttctcctggtgagaagagatgccagcccctggcatctgggggcactggatccctggcctgagccctagcctctccccagcctgggggccccttcccagcaggctggccctgctccttctctacctgggacccttctgcctcctggctggaccctggaagctctgcagggcctgctgtccccctccctgccctccaggtatcctgaccaccggccctggctcccactgccatccactcctctcctttctggccgttccctggtccctgtcccagcccccctccccctctcacgagttacctcacccaggccagagggaagagggaaggaggccctggtcataccagcacgtcctcccacctccctcggccctggtccaccccctcagtgctggcctcagagcacagctctctccaagccaggccgcgcgccatccatcctccctgtcccccaacgtccttgccacagatcatgtccgccctgacacacatgggtctcagccatctctgccccagttaactccccatccataaagagcacatgccagctgacaccaaaataattcgggatggttccagtttagacctaagtggaaggagaaaccaccacctgccctgcaccttgttttttggtgaccttgataaaccatcttcagccatgaagccagctgtctcccaggaagctccagggcggtgcttcctcgggagctgactgataggtgggaggtggctgcccccttgcaccctcaggtgaccccacacaaggccactgctggaggccctggggactccaggaatgtcaatcagtgacctgccccccaggccccacacagccatggctgcatagaggcctgcctccaagggacctgtctgtctgccactgtggagtccctacagcgtgccccccacaggggagctggttctttgactgagatcagctggcagctcagggtcatcattcccagagggagcggtgccctggaggccacaggcctcctcatgtgtgtctgcgtccgctcgagcttactgagacactaaatctgttggtttctgctgtgccacctacccaccctgttggtgttgctttgttcctattgctaaagacaggaatgtccaggacactgagtgtgcaggtgcctgctggttctcacgtccgagctgctgaactccgctgggtcctgcttactgatggtctttgctctagtgctttccagggtccgtggaagcttttcctggaataaagcccacgcatcgaccctcacagcgcctcccctctttgaggcccagcagataccccactcctgcctttccagcaagatttttcagatgctgtgcatactcatcatattgatcacttttttcttcatgcctgattgtgatctgtcaatttcatgtcaggaaagggagtgacatttttacacttaagcgtttgctgagcaaatgtctgggtcttgcacaatgacaatgggtccctgtttttcccagaggctcttttgttctgcagggattgaagacactccagtcccacagtccccagctcccctggggcagggttggcagaatttcgacaacacatttttccaccctgactaggatgtgctcctcatggcagctgggaaccactgtccaataagggcctgggcttacacagctgcttctcattgagttacacccttaataaaataatcccattttatcctttttgtctctctgtcttcctctctctctgcctttcctcttctctctcctcctctctcatctccaggtgcaaatagtctacaaaccagttgacctgagcaaggtgacctccaagtgtggctcattaggcaacatccatcataaaccaggtagccctgtggaaggtgagggttgggacgggagggtgcagggggtggaggagtcctggtgaggctggaactgctccagacttcagaaggggctggaaaggatattttaggtagacctacatcaaggaaagtgttgagtgtgaaacttgcgggagcccaggaggcgtggtggctccagctcgctcctgcccaggccatgctgcccaagacaaggtgaggcgggagtgaagtgaaataaggcaggcacagaaagaaagcacatattctcggccgggcgctgtggctcacgcctgtaattccagcactttgggaggccaaggtgggtggatcatgaggtcaggagattgagaccatcctggctaacacagtgaaaccccgtctctactaaaaatacaaaaaattagccgggcgtggtggtgggcgcctgtagtcccagctactccggaggctgaggcaggaaaatggcgtgaacccggaaggcggagcttgcagtgagcggagtgagcagagatcgcgccactgcactccagcctgggcgacagagcgagactccgtctcaaaaaaaaaaagcacatgttctcgcttctttgtgggatccaggagatagagaatagaaggatggttaccagaggctgggaagggtagtgaggggatggtggggggatggtcaatgggtacaaaaaaaatagaataagacctagtatttgatagtgcaacagggtgactatagtcaataataatttaattgtacatttaaaaataactaaaagatagccgggtgcagtggcttacgtctgtaatcccagtactttgggaggctgaggtgggcgtttgagaccagcctggccaacatggtgaaaccccatctctactaaaaatacaaaaattagccaggcatggtggcgggcgcctgtaatcccagctactcgggaggctgaggcaggagaatcacttgaacctgggaggcagaggttgcagtgagccgagatcttgccactgcactccagcctgggtgacagtgaaactccgtctcaaaaataaaaataaaaatacagctgggcacggtggctcacgcctgtaatcccagcactttgggaggccgaggcgagcggatcacaaggtcaggagatatagaccatcctggctaacacggtgaaacccggtctctactaaaaatacaaaaaattagccaggcgtggtggcaggtgcctatagtcccagctactcacaaggctgaggcaggagaatggcatgaacctgggaggcggagcttgcagtgagccgagattgtgccactgcactccagcctgggcgagagagtgagactccgtctcaaaacaaaaacaaaaacaaaaacaaaaacaaacacacaacaaaaacctaaaagaatataaatggattgtttgtaacacaaaggacaaatgtttgaggggatggataccccattttccatgatgtgattattatacattgtgtgtctgtatcaaaacatctcatgagccccataaatatatacacctaactatgtacccacaaaaattaaaaaaatatattttttaaggtgaagagggaggcgagatgctggccttaacccctaacccgttgttctccctgcaagctgtccacagggcctctcagactcgaggttcagctatatggatgcatgagcttggtccccagccaacatgggagacacttcaccatcggcagcagctacagcacaggaaccctgggtcactgccatgtcccctctgtgactttgtttaaacagaaaatgatgctctgggccggctgtggtggcccacacctataatcccagcaccttgggaggcgggggtgggcagattgcctgaggtcaggagttggagatcagcctggccgacatggcgaaaccccatgtctactaaaaatacaaaaactagccaggcatggtggcacatgcctgtaatcccagctacttgggaggctgaagcaggagaatcacttgaacccaggaggcagaggctgagtgagccaagatcgtgccaatgcactccagcttgggtgagggagtgagactccgtctcaaaaaaaaaaaaaaagaaagaaaaagaaaagaaagtgatcctactggaaccatgcttactcccctccccacctcacactgtgtagaaattagtgctgtcggccaggcgcggtggctcatgcctgtaatcgcagcactttgggaggccaaggcaggcggatcacgaggtcaggagatcaagaccatcctggctaacacagtgaaaccctgtctctactaaaaatacaaaaaattagccgggcatggtggcaggcacctgtagtcccaactacttgggaggctgaggcaggagaatggcatgaacctgggaggcggagcttgcagtgagccaagatcgcgccactgcataccagcctaggtgacagagtgagactcagcaaaaaaagaaagaaagaaagaaagaaatcagtgctgtctatacttctttctgcagtgatggaaatattctgtatctgtgctgtccagtatagtagccactagctacatgtggcacttgaaacatggctggtacagttgaggaagagtggctgccatatcggacgacacagctatagattctgtcaccccaccccgagagtccagagcggggacttctgccttaggccctattcagggctgatttttacttgaacccttactgtgggaagagaaggccatgagaagttcagtctagaatgtgactccttattttctggctcccttggacactttgtgggatttagtctccctgtggaaagtattccacaagtggtgccaccaccccagctgtgagagcagctgggagctgcttttgtcatctttccctggaaagtcctgtgggctgtctcttcctcatgccttgtcccatgcttgggcatggtgtcaagcgtcaggagggagaaagggtccttatttatttatttagagagggacccttcttctgttcccaggctggagtgcagtggtgcgatctcggctcactgcaacctccgcctcctgggttcaagtgattctcctgcctcagcctcctgagtagctgagattacaggcacatgccaacatgcctggctaattttttttttttttttttttttttttttttgagatggagttgtactctcattgcccaggctggaatgtaatggcacaatctcggctcactgcaacctccacctcctggattcaagcaattctcctgtctcagcttcccaagtagctgggattacaggtgcccgccaccatgctcaactaatttttgtattttttttttagtagagacgaggtttcaccatgttggtcagactggtctcaaactcctgacctcaggtgatccacctgcctcggcctcccaaagtgctaggattacaggcatgagccaccacgcccggcctgaaagggttcttatttagtgtgcattttgacattcaatttaattccaaggtcttgtggggtcatggtttacaggatgttgatatagaaaagacttcacttaatgggccgggcgcagtggctcatgcctgtaatcccagcactttgggaggccgaggcaggcagatcaggaggtcaggagattgagaccatcctggctaacacagtgaaaccccatctctactgaaaatacaaaaaattagctgggcgtggtggcaggcacctgtagtcccagccactcggttggctgaggcaggagaatggcatgaacccgggaggcggagcttgcagtgagcagagaccatgccactgcactccagcctgggcgacagagcaagactctgtctcaagaaaaaaaaaaaaaaaacagactttacttactggaagccaaccaatgtatatttagagtaatttttcctgggctgagctgtcatttacttttgcagtatctcaagaagaagagtttacagtgtaaatatttgatgcacactttgattatatagatgaagcaaactattttcaagagctttgcaaggacttacttgtatccaaacaccattctaaaggagtcttacctacttctaaaggctggtctctacttggaaccacttgcttggccctggttcaagtcctgctgcaaacctggaagtcctgtcattgtcttcttccctccagagcagtggcacccaatctaatttttgctgtgccccagcagcccctggcactttgccctgtagactgcagacctcatgtaatgtatgttaagtccacagaaccacagaagatgatggcaagatgctcttgtgtgtgttgtgttctaggaggtggccaggtggaagtaaaatctgagaagcttgacttcaaggacagagtccagtcgaagattgggtccctggacaatatcacccacgtccctggcggaggaaataaaaaggtaaagggggtagggtgggttggatgctgcccttgggtatatgggcattaatcaagttgagtggacaaaggctggtccagttcccagaggaggaaaacagaggcttctgtgttgactggctggatgtgggccctcagcagcatccagtgggtctccactgcctgtctcaatcacctggagctttagcacgtttcacacctgggccccaacctggagaggctgaccaatgggtctcaggggcagctcggttgctggagtttttgtttttatttatttttatgtatttaaggcagggtctctgtattagtccattctcacactgctaataaagacatacccaagactgggtaatttataaaggaaagaggtttaatggactcacagttccacatggctggggaggcctcaaaatcatggcggaaggcaaaggagaagcaaaggcatttcttacatggcgacaggcaagagagcgtgtgcaggggaactcccatttataaaaccatcagacctcatgagatttattcactatcatgagaacagcatgggaaagacccgcccccatgattcagttacctcccactgggtccctcccatgacacatggaattatgggagctacaattcaagatgagatttgggtggggacacagccaaaccatatcagtctccctctgtcatccaggctggagtgcactggcatgatctcggctcactgcagcctctacctccctgggtcaggtgatcttcccacctcagcctcccaggtagctggaactacaggtacctgccactatgcctggctaaatattttgtatttcctgtggagacgaggttttgccacgttgcccaggctggtcttgaactcctgaggtcaagcaatatgcccacctcggcctcccaaggtgctgggattacaggtgtgagccacagtgctcggcctaagtcactgcagtttttaaagctcccaggtgattcttcagtgcagtcaaaagtgagaactggctgggtgcggtggctcatgcctgtaatcccagcaccttgggaggcgaaggtgggcagatggcttgaggtcaggagttcaagaccagcctggccaacatggtaaaaccccatctctactaaaaatacaaaagttagctgggtgtggtggtgcgtgcctgtaatcccagctacttgggaggctgaggcatgagaattgcttgaacccaggggacagaggttgtagtgagccgagatcgtgccactgcactccagcctgggcaacagagtgagattccatctcacaaaaaaaaaaaaaaaagcgagaaccactgtcctaggccctgatgtttgcaggcaactaaaaaaggaagtggacatccccagtcagctgtggcgcaccaagaacaagtcatgggaacataacctaattttctaaatgggttactaggcacttagagcaaaacaatgatgccgaaatcctgatttcagcaaagcctctgcctgcctgtcttggaagtatccacatgaggctgctggggccttggtgtccccagcagtttctagtctctaggtcttgctgtgggtgtctgtgcagtgagggtgtgtgtggcgctgggtgagctctgtctaggcctggcacaggatgcggtctggtagctgctgcttctcttctgcagaagcgcagccaagcaccctctggggtttcaggcccacacccagcctgaagttctgggagtggctcactttccaaccttcagggtctcccagcagctgactggggagtggtggagggaaaagggattgtattagtccgttttcacgccgctgatgaagacatacccgatactgggcagtctaaaagatagaggtctgatggactcacagttccacgtgactggggaggcctgacaatcatggtggaaggtgaaaggcttgtctcacacggtggcagacaagagaaaagagcttgtgcaggggaactcccctttataaaaccatcagatctcgggagacttattcactatcatgagaacagcacgggaaagaccctcctctatgattcaattacctcccaccaggtccctcccacaacatgtaggaattgtgggaactacaattcaagatgacatttgggtggggacacagccaaaccatatcagggcgtcccagaaagggtatagggtctgagacccaagtcagcatgagaaagtatgcttctcatggtggcccagttgggtggaagtggcagccgggccgtctttccaccaggccactcaagtagcagctgagagacccctgccctggccagtccccgccctcccctcttgccactgcctctggttctgaacagatgggcaccctcatcttgtatttgtgattaatgtctaacaatgtagttttgtgagaagggtttgctgatacagccttgctgcagatgctgcgaactgtggcctggggcagaccttacctccagacacgccctgaggcaggggagggcactggcccgtagctggccgagagctctcgggttgcgcgacagggatacttttcagcggctgggtcgctatccaaagtgagaaaacgaggagggaccaggaggctgtccgcctcaagagatgtgggggccaggtccagttatctggggaagcagtaagcttctctgctgtttctaaccccaggcctcccctggtctaaggcagggcctcccagcctcggggcactttaaagatatctgggcctggccccatccccacagtctgactgagtgggtctggatagggcctgagcattggtgatttcctgggtgaaaggaggcccctcacagtctctggaagcttctctgtgttaggaaaagctctgggcttgactctgctttgaaagtcaagatccgcaaatcctctcagcctcagtttctccttcagcaagatgaaatggaaatgctgtacctacgtcccggggtggttgtgagacccaaaaaagacaatgttctggaaggttcctggtgcgttgcagtcctctaagaacctgagttagagccacgctgagtctcagcttcttggctccttctgtttcaaactcgtccatgtgatagctcaggaagggtaggcagggccctgccccctactcagaaaacaccatcctggtcctggggatccccgcagcattagtcccctgttttcccagtgtattgagaaaaattgctaacaagcagtggggcacaccaccagcctcctgggttcctttcagtttggggatttttggacattcccaggaatgtcttaaaaaacacttcaaaaaacattaacataaatatttttatcaaagcctgtattaaatggtctttcaagaaaatacagtaacaggtcaggcatggtggctcatgcctgtaaccccagcactttgggaggccaaggcaggcagatcacctgaaatcaggagttcaagaccaacctggccaacacagccaaatcccatctctacaaaaaatacaaaaattagctgggtgtggtggcacacacctgtagtcccagctacttgggaggccgaggcaggagaattgcttgatcccggaggcggaggttgcagtgagctgagatcgtgccactgcactccagcgtgggtgacaaggtgaatctttgtctcaaaaaaaaaaaaaaaaaaaagataaaatacagtatacagtaatagagaacaatccttttttcaaagtagtgaccccaaatgaacaaaatatgcatctagcttaaatgcgaacctggttttctctacgcccattcaagcccctgcaataggggcccttcaccccgcatccatggactcctaaaattatatggaaaatggctgtgtgtgagtgtggatggacatgtgcacacatatttttggctttaccagatgctcaaagagcctaggacccaaaaagggctgagaatgaccgtgtcggccacttcagggtcatcaggaattgctgtgcactgctcacttctccagtgaacactttctgcttctgtgtttcctggtatcctttgggactcctggctaggtcatgtgtttctctactttcaaaagggcttcagccaggcacgatggcatgagcctgtagtcccagttgctctggaggttaaggtgggaagattgcttgagcccaggaatttgaggccagcctgggcaagtagataggtagatgattgatagatagatagatagataaatagatggatagataagtcgctagacagtcatccatccacccatccacacataaaaaggcctttgtcatgtcatgttttgtggcccacctgccagtgttgcccacagttgctgcccctccaaactcatcagtcactggcaaacaggaggaatgtgtggctcatgtctgggcatcagtggctgtgggagacatccttgatcttctccagcttctccttccacattttcctttgcaatctggcaatatctattaaaataaaatgtgcatgccttttgacctaagagcttcacttctaggacccacttacacgtgtgtgacatgatgttcatacgggtttatttatctgaggttgttcatacacaccattgcctgtaatcactaaaggcgggagcagcctacacatccatccacagaggagtagatgccttttggtacatccgtggcgacggaatactaagcagcctgtgtatctatacactcacacgtgtttgtttatgtgtggaatatctctggagggtacacaagaaacttaaaatgatcactgtctctggggagggtacctgggtgcctgggaggcaggtcagggaaggagtgggcacaggtattaccaattggaagacaataaaaacaacagctcctggccaggcgcagtggctcacgcctgtaatggcagcactctgagaggctgaggcgggcagattgcttgcgtccaggagttcaagaccagcctgggcaacatagcaaaaccccgtttctattaaaaatacaaaaaattagccaggtgtggtggcatgcacctgtaatcccagctactcgggaggctgaggtgggagaatcacctgagcctgggaggtcaaggctgcagtgaggtgagattgtgccaccgcactctagcctgggcgatagagcaagaccctgtctcaaaaacaaacaaaaaacagtccctggcactctgggccaggcctggcagggcagttggcagggctggtctttctctggcacttcatctcaccctccctcccttcctcttcttgcagattgaaacccacaagctgaccttccgcgagaacgccaaagccaagacagaccacggggcggagatcgtgtacaagtcgccagtggtgtctggggacacgtctccacggcatctcagcaatgtctcctccaccggcagcatcgacatggtagactcgccccagctcgccacgctagctgacgaggtgtctgcctccctggccaagcagggtttgtgatcaggcccctggggcggtcaataattgtggagaggagagaatgagagagtgtggaaaaaaaaagaataatgacccggcccccgccctctgcccccagctgctcctcgcagttcggttaattggttaatcacttaacctgcttttgtcactcggctttggctcgggacttcaaaatcagtgatgggagtaagagcaaatttcatctttccaaattgatgggtgggctagtaataaaatatttaaaaaaaaacattcaaaaacatggccacatccaacatttcctcaggcaattccttttgattcttttttcttccccctccatgtagaagagggagaaggagaggctctgaaagctgcttctgggggatttcaagggactgggggtgccaaccacctctggccctgttgtgggggtgtcacagaggcagtggcagcaacaaaggatttgaaacttggtgtgttcgtggagccacaggcagacgatgtcaaccttgtgtgagtgtgacgggggttggggtggggcgggaggccacgggggaggccgaggcaggggctgggcagaggggagaggaagcacaagaagtgggagtgggagaggaagccacgtgctggagagtagacatccccctccttgccgctgggagagccaaggcctatgccacctgcagcgtctgagcggccgcctgtccttggtggccgggggtgggggcctgctgtgggtcagtgtgccaccctctgcagggcagcctgtgggagaagggacagcgggtaaaaagagaaggcaagctggcaggagggtggcacttcgtggatgacctccttagaaaagactgaccttgatgtcttgagagcgctggcctcttcctccctccctgcagggtagggggcctgagttgaggggcttccctctgctccacagaaaccctgttttattgagttctgaaggttggaactgctgccatgattttggccactttgcagacctgggactttagggctaaccagttctctttgtaaggacttgtgcctcttgggagacgtccacccgtttccaagcctgggccactggcatctctggagtgtgtgggggtctgggaggcaggtcccgagccccctgtccttcccacggccactgcagtcaccccgtctgcgccgctgtgctgttgtctgccgtgagagcccaatcactgcctatacccctcatcacacgtcacaatgtcccgaattcccagcctcaccaccccttctcagtaatgaccctggttggttgcaggaggtacctactccatactgagggtgaaattaagggaaggcaaagtccaggcacaagagtgggaccccagcctctcactctcagttccactcatccaactgggaccctcaccacgaatctcatgatctgattcggttccctgtctcctcctcccgtcacagatgtgagccagggcactgctcagctgtgaccctaggtgtttctgccttgttgacatggagagagccctttcccctgagaaggcctggccccttcctgtgctgagcccacagcagcaggctgggtgtcttggttgtcagtggtggcaccaggatggaagggcaaggcacccagggcaggcccacagtcccgctgtcccccacttgcaccctagcttgtagctgccaacctcccagacagcccagcccgctgctcagctccacatgcatagtatcagccctccacacccgacaaaggggaacacacccccttggaaatggttcttttcccccagtcccagctggaagccatgctgtctgttctgctggagcagctgaacatatacatagatgttgccctgccctccccatctgcaccctgttgagttgtagttggatttgtctgtttatgcttggattcaccagagtgactatgatagtgaaaagaaaaaaaaaaaaaaaaaaggacgcatgtatcttgaaatgcttgtaaagaggtttctaacccaccctcacgaggtgtctctcacccccacactgggactcgtgtggcctgtgtggtgccaccctgctggggcctcccaagttttgaaaggctttcctcagcacctgggacccaacagagaccagcttctagcagctaaggaggccgttcagctgtgacgaaggcctgaagcacaggattaggactgaagcgatgatgtccccttccctacttccccttggggctccctgtgtcagggcacagactaggtcttgtggctggtctggcttgcggcgcgaggatggttctctctggtcatagcccgaagtctcatggcagtcccaaaggaggcttacaactcctgcatcacaagaaaaaggaagccactgccagctggggggatctgcagctcccagaagctccgtgagcctcagccacccctcagactgggttcctctccaagctcgccctctggaggggcagcgcagcctcccaccaagggccctgcgaccacagcagggattgggatgaattgcctgtcctggatctgctctagaggcccaagctgcctgcctgaggaaggatgacttgacaagtcaggagacactgttcccaaagccttgaccagagcacctcagcccgctgaccttgcacaaactccatctgctgccatgagaaaagggaagccgcctttgcaaaacattgctgcctaaagaaactcagcagcctcaggcccaattctgccacttctggtttgggtacagttaaaggcaaccctgagggacttggcagtagaaatccagggcctcccctggggctggcagcttcgtgtgcagctagagctttacctgaaaggaagtctctgggcccagaactctccaccaagagcctccctgccgttcgctgagtcccagcaattctcctaagttgaagggatctgagaaggagaaggaaatgtggggtagatttggtggtggttagagatatgcccccctcattactgccaacagtttcggctgcatttcttcacgcacctcggttcctcttcctgaagttcttgtgccctgctcttcagcaccatgggccttcttatacggaaggctctgggatctcccccttgtggggcaggctcttggggccagcctaagatcatggtttagggtgatcagtgctggcagataaattgaaaaggcacgctggcttgtgatcttaaatgaggacaatccccccagggctgggcactcctcccctcccctcacttctcccacctgcagagccagtgtccttgggtgggctagataggatatactgtatgccggctccttcaagctgctgactcactttatcaatagttccatttaaattgacttcagtggtgagactgtatcctgtttgctattgcttgttgtgctatggggggaggggggaggaatgtgtaagatagttaacatgggcaaagggagatcttggggtgcagcacttaaactgcctcgtaacccttttcatgatttcaaccacatttgctagagggagggagcagccacggagttagaggcccttggggtttctcttttccactgacaggctttcccaggcagctggctagttcattccctccccagccaggtgcaggcgtaggaatatggacatctggttgctttggcctgctgccctctttcaggggtcctaagcccacaatcatgcctccctaagaccttggcatccttccctctaagccgttggcacctctgtgccacctctcacactggctccagacacacagcctgtgcttttggagctgagatcactcgcttcaccctcctcatctttgttctccaagtaaagccacgaggtcggggcgagggcagaggtgatcacctgcgtgtcccatctacagacctgcagcttcataaaacttctgatttctcttcagctttgaaaagggttaccctgggcactggcctagagcctcacctcctaatagacttagccccatgagtttgccatgttgagcaggactatttctggcacttgcaagtcccatgatttcttcggtaattctgagggtggggggagggacatgaaatcatcttagcttagctttctgtctgtgaatgtctatatagtgtattgtgtgttttaacaaatgatttacactgactgttgctgtaaaagtgaatttggaaataaagttattactctgattaaataaggtctccattcatggattccaaggacaagaaagtcatatagaatgtctattttttaagttctttcccacgcacccttagataatttagctcagaacaggaaatgatagtattaataaaagctggacatcaggattaacagctctctctggggccctgaaggtgagagttctcagacttgctcatttgcagttgcttctttgtgatgctggcaaaccatcctagtcccattcaaagggcaatacaaagccttgtggctgacctcacgatgcagcactcagtttgcaagaccggcaccagtgtatgcaaacctgagaaggttggggatgaggatatgggatctttcatccctggaaatttagtccagaggcctggggctggagcagaacaccaagccaatcagcttaatgaatggcttagattcctgctaggtttgcagagctgccttctttcctttggtaccttattatagattgaggagtatttctgctaaaccaagatagggataaccagatagcatcttcatagcaatgccacaaaggaaaacaaaaacaaaacagtaatccatcatattattccttagtaactatgccaaggtcatgatactgaatccttagattgtttcaaaatactacttttctttgctcttcctgatgtgtttgccaccgcaggcagatgtttaagtaaaacagattttaactgcagctacaaaagcagcaacaggccagcaaaagagaagtgctatctcagagagcatggctttcagagccacaagagacagcctcactggctgtttcagcttgactgccatgcaaagaagagagcagagggagaaccagccccacccacttattcatcttgtacaaaaaaaaagcacctaccagcctaggctacatagtgagacactatctccacaaaaaacccacgaaaactagctgggtatggtggcacatgcctacagtcccagctactggtaaggctgtggtgggaggatctcttgaggccaggaaggagatccaggctgcagtgagccaagattgcaccactgcactccagtctggacaatcgagcaagatcccatctcaaacaataaaaaaaaaaagcgtgtaacctcctcagaagaaagatgttataatctcaggcagcaggcaagaaccaatccaggctctaagcaaattatgtatctcactgaccccaccaaacctcagaaaaatttaacagtgagaagcaaaatctcctttaaagagcaacttagaacagatagaaaatatcatacagctgacttcactagagagaaagtgcatcaactgctttcactcaacaaaaagaaaaaagagatgatcaatgcagatcccctctcctcctggcagcccttaccctcagtgaaaagccaccaccattctctctctggtggccatcagatcaacctgcggcgttcccacaagacagaatggagattttccaaggtatagagcaagtcagagtaccccaaagaacggcggcagagagccagctccgaaactgccaacactaccatgcatacacagttcagtaagtcaagaaaggcctggtacacagcattctgtaacttttttttttatttttttcaatttttccttcttttttttttttaagcactagtctgtgctttgcgaacagaatcaagacattaacaaagatcagcttctctgaagaaaagcatttctatagaacaaagacagctacatgtttcgctgccattacacagctccaaagcaggaaaagaaaatatttacaaaatacaaggttttttttttccattttttgtttttgttttttttttcaatgctaaaagggttattcagaattttcaaccttataaatagaagaagcactttatgcatagggatatggtgcattattgtatttttttttaaagaaacaatgacaaaccctttaacttgcaaacagaaaaaaaaatcactaatgttgaaaattgtgaaaaaaccccaaccattaagcagttgtctactatttttatacgattacaaaatggccaaaaaaaaagagtcttctcccccctccccctttttggtgatgtgatcatacaggagacaggcacaaggttaacagagaagggtgaagggggaacaatgggaaccacagctaggaccagacaatgttccacaggcaaggggagcgtgaaagaccaagagtggaactaacaccgacagggatctggatgtgaaggaaacatggcaaagtgaatcagagggaaaaaaaaaaaaaatcacacagggagatggctgctcacttcccacaacccccagtttgcaggggagtgggaatagaggttaagtagtcctaaccctaccttcaaagatcaggataggtggtaaaaatattccaagtggaaggacgggttgtgggtgtgtacatggcatgggagagcagacagggaagggtaccaaggggcatgaggaggggaacctgagcagccacagccaggttactgcagtgaaagagtcaaaacagagaagaccaaatgcagatgaaacaaaaaatcagtctcttaagttctgggtgagaaaggaaaggtgttctgccagctgagcactcggggagagcagctggcagttatggcagagaggctctggtggggatgttccagcacgaaaaaccaaggggacccagccaggagggccacagcagagccaagccacagatgggaggggagggggtaagagtccagagcaccctgccccattccaccctagctcaagaaggccatgctaaactgtagcccgccaggctgttctgccctgcccacaggtgtgagggagggggtggtcatctaagatcagtaagtccagtgattcaacagtgcagaggatgtgccaggaccaggccagcagggtctcatcctgaacttctgtttgccaacgggaggaagtgctcaggtgtgtgacaagaaaacatggaaacaaaaacaaaacaaaaattaaaacaagaaaaaaaaataccaaagtaggatctaaattccttaagttcactaaaaactgtgaaaatttccggcatatgatgtttgaatatcaaacgcagagatttctgaagctttaatgccaatagttagtgagtctgtttagatggctgtctcccgctcatctgtgagtcgggcgctgagctgtggctgctgccaccagatgccgactcttgagggggacaatgggaggcgaggtgggcgctgcctctgtctcccggccagtcttgctgcctgaggtgcgtcgagtgcagcgggctgctcgctcctgtgcatccagctggtcctcacactccgcctggggactgtgcgccagggggaaggtccgccgctcccagggctggacagactgtaggcagacaagttgctctttgaggacccagtcccagccagcctgcttcctgctccaaggccctgccacaaaccttgtggcctggagcctaggaccagtctatctagtgttcctgcgacagtctgggaacacccctcctagggtatacccagacaactgtattgatcatttagcagtgatcaatacagttccactgaacgttgaggagatcaatttaagtgcagccctttgtcccttcaaaagggggaggggatggctaggtccctcttcagcagatgctgccccttcctggttccatcccccaaccatgccaaccccacccaaaggctgcgtcccttacctgttcatccagccccagctctggtgtggaacaacgggtatcctcactggctaagtgtcgcggagtgtcccgagccacaggggtgaggggtgctgagtgcagttccgggctaatggggctcctaggggactgaccatgggagtattctgacaaagagtggctactgctgacatcaggggaggcaggctggggggtggaggggttggcactgcccagctggggggttgtccggccgtctgatgacctgtaggacctgcacaccaaggaatgcaaatctgagtgcctgggaaatgtttacttatgggggtagagggcatgaaaaaagcatccccactggaggagttgaggcaaacaaacaccaacagattttccttaggatccagcaactcccatttcttcccactattctctggaggggtaggtatacaacatttaccatcccaagaaaaaagcatggctgaacaatgccaggtgagtccatagcaaagtgcctagtgaattcaggaggttagggagattcgtgtagactttgaaaactgtagtcaaagaaaaaaaagtaaaagtaagagctcccaaaactttctacttgagaatcccgagggtttctgccactgttaacaataaatggagacagggtagtgatggacgttaagggggggcagtttcttcaagtggcatcacaaagccactgtccaaaggaaggttaacttgtagcgaggccttccaagctccccgggttgaatcaccatgaccccccaactgtcttccaaatgccacagatcatgggaattcagaattacatagtgacttctcagcaaggatctagcacttggctccttatatctccactagttccatgtatctccactagttccaacaaacaccaaggaaattctgagctatttgccactgccagtagatgagtatgatgagcaaccaagaggcagtagcaattccatggactcaagtagggcccaaactccctgtccaccctctctccacaggccctggggacccaagcctgccccatcacctgctgccccgccgctggggtggcacactcgtggtccacagccaccgtgccctctccatctcctcacatttggcatgcagggcggcgaaggctgcgtcggataggtcctcaatctgcaatagagcagcttcatcgatcccctcttttctccaggagttaagaaccagtcccaccccattctaggttcttcccggtcacgacaggaatacaaggagcttgcacttcacacccacaagtcttcaggccatttagggtgtgtgcactcatatgtatgtgtgcatgtgtacacacgtgttcttctaacagaagaaccaggccattacctcttcattctcctcatcaggactccccttcagagactgaagatcaacctcccgccagctgcaaaaccaagaacagacaatcatgagatggcaagcaggctaaaactgggggcagggtcaaagtgtccatgcaaggatgagaatcctgcacctgtgggtgacactgctctctgccgggtaggctctgccctatcacagctcagtctccctaccctgtcaaggcctgtgaaattggccacctactcaaatgcccaagaaggccagaaatgagagaagcggcctagggtaaggctgaggctgagagactgtgacaaacacaagaaaagaaacctgtttaaagaggaccaccactgttcaggaccagctgattgctcccatatggaaatgcatacccagggttgcctaatcttctgtttggcaacaaaagctggaaacaaagatttttatgtgaaatcctgctttgatgttgacaacaaattcagtattttaaaacatactgtatgtgttgacaaaaccggtctctagaccagtaagtgaatggcctaccaggctgtgactgctggttcgtttggtgtattcctataatggaatgagagagaactatatacagaaataatttcgttcttatcagataagaatttctcttaatgagaagacagaaccaaagactagggcccaactcttggtcagaagagaagagggaaaaagggcaatagcaggaagaatggggagaggagccaactattctgagcttctacctgggcgtaaggatttccttgtattgcagtttctctacgcgagttgttgcagcaacagacattgggatgacaatgttgttaatatcaaatgagctctctccccttctcctccttactggctgctgctgtaagataaaaattaagtttaaaaggaaggtacaattttacagacatcaaatcattcatctaagagttaaagcaggatcaccaataaccaagcatctgggtccttgggttgaagctgagtaatgaccatagcagctgctcccacctaggagtcagtctccaacagcaaaaaacctcacggagaaataccaggtggtcatgaggagttagtcccattcataagtcccactggtcaccctcttccttcaagggctcatgcgtaaatttcataggggtgggtacctgggatcttaactgttggggttcctactctatatacacctctattaacctcctctccttttacaatctttatttccttcctttatccccgtttatgacttaagactcatagtggcccctcccctaaaagcaatgcttgaaagcttatgctgaaagaggcccaaaggataggcccatctcaatacatcatctaaccttggttgtcatgaatgcacctccttctcaaagatctgaactcttcagctaaatctgcacccaccatctgcccagtctttatgtgatttcccctcttttgatgattcttggggaaagagctgagagctttctagctgtatcaaaggagatgaatggagggaaactaaagaggagaacctgactatacctcacattcctggtgaaaggaaatttgcttctataggaaatagttgagaagaccaaactcttggaaaaataagacttccaaggatcgaatatcagaggcagaggtaagcatctacagtagctgggagactagggaactaaatggcttagtctcttggatggaggaagaagtctactagctgctgctgcccagatagttaataccctatcctgaaacagagactagcaactgagctgtgagaggccagaaggaaacagtggcataacaaacacgctgccatggcaacaaaacagctggaaaacacctaagaggctgcatttatacctaaaccaccaagtgtggtcagtccacagggaaggggttggaggagtaagaagtcccctataactaacccctctatcctctgttcctggacggtgagataccctttattcatcctatcatcttaggacattctcagagaatgttaaaagtcagcacttcctgggccagagtttcagtcactgtcatttataacttcagatgaccacaatgcccttttcacttcaatttctttctctatcaaatcagatgactgccattgacctcagaaatttaggatatctggttaaccaaaatggttaaacagacttttggggatcttgcctgagttctgtagctgaggattagtgatctcatacccagagacctctgccactgccagatctgtgctgaaattatacatcccactacaagaaatgcatcttaagaaagcctcaagagagacagccttcccagtatcttggtcaagaataaatgtgaaactgctggcagaaacaggtatacactttccctgaaacttcttgggcttgttgttagtaccttcgagaaaaagatactggagcaggttgtgggatggttcaacgggctcttatctcatcctctgcctagacacaccccctattatgttagctactcattaggtctaaattaactactatctcctatttagagccagagatagagagcaggtgatgagaataaaactggttcccaaacttggttgtatatcagaagcaacattaaggagtattttttaaaaaaaaaaaaaaggttctaggactcccccccgctcttttataaaatcagaattttgtttgtttgtttgtttaagagatgaggtctcactatgttgtccaggctggactcaatctcctgggctgaagagatcttcctgagtagctggagctacaggcatgcaatatcacagccagcaacaaatcagatctttagaagtgtctggttggttggttttgttttttaaagctgctgaggtgattctgatgcagctactggcttttgggaagcactgacaaaaacactcgctctcctccctacctttctccagtgtcctctggcttctttacttgatttcaaggagagctggccctttgtatccatgggttcaaccaattgtggattgaaaatatttgggggaaaaaaattgtgtctgtactgaaaaggtacagatttttcttttcattattctctaaacaatacagcatactatttttatagcatttacattgcattaggtattatcagtaatctggagatgatttaaagtatatgggatttaaagcatacacataggttatatgcaaatactatgccattttatattagggacatgagcaacaatagcttttgctatctatgggaggtcctggaaccaatccccactgcagatactgcagatactgagagcctgctgttatctggcctatcttctttctttttttttttttgagacgaagtcttgctgcgacgcccaggcttgagtgcaatggcttgatctccgctcactggaacctccgcttcccagttcaagtgattctcctgcctcagagtagctggaactataggcacatgccaccacgcccagttaatttttgtatttttagtagggatagggtttcaccttattggccaggatggtctcgaactcctgacctcaagtgatccacccgcctcagccgcctccccaagtgctgggattataggtgagcgccactgtgcctggcctatcttcttttacataaatccagagtctttgaaaaaacttggcaatgagagagcctcaggggttagcatagtgctatacacaaaatttttactcaataaatggtaaaaatttcaagtgatccaggcctaagttaacattctccagacacagaaatattgaagtgctcaccaagtcctgaatctctgagttcagattttctatcagaattagtttagactcttttttataaatactttggttatctgaaaccctttgctgctggataactgagtatgtgagggacactacacacctatttagataaaatttgtgggttacgggggtaaagaaagtcgaagagcaaagagaccatttggaaaagattgatttgtaacagcaaagagagaacaatgtgaattcctacctgatcacaggagcctagtgagtccattttatgagcttggaagtttcctgatctaggctctgaaggaacttcctaagttgcctctgcaataccctcacccaggcttagcctgtgtagtgtaatggtaaaagagctggctctacagtcaggctgcctgagtttgaatcataattataaccctcacaagttgccttgacagttttcatgcatataaaatgaaatccacagtaccaacctacatctcaaaaggcattataacatgtaacacatgtaaatcactgatcactggtatgtagtaagtgttcaataaacattacagttgcagacttttacatttaccattacattacattgtaattattatacaaaaaggaccctttgagtaggtccatagcagctacaggtatgtatgttccaagagggcacacttgaggaattaaaatattagaatgaaattaaaggaaatgtgtctggaatagctgtgcaaactgcttccagatggagtgtggtatcgtaaaatctggtgtgtgcatgccaaatgtcctgccatgggggcctgctggatctgtaattctgctctgtatacctaaaaagcatggactctgccttctcccttcccttctcttctggtaccctcacgcctagtgtttattcttagtacttcacctccactcacccagagagtaaaaccaaggaaatcaaacactgcttccaacgcccatgggaatctcccctctacccacccctcctctcttgttcacttcttgggccaacaggattagggccacggaactgttgagtcctgtgtgaaacttagtccaacagatcttgaatagtcacagatcaccttaagagtttgtccctgcatcaagctttctatggatggctcagcataaatccatctctgctatgaaaaacaactcaagaaaaacaacagaaggtcaagtaccatgactttgacttaaaaatggtacagacatacatacatatgtcatgatgagctgagatcctataaatgccctgggctttataacccaccctcacactgtcctctggagccacttgagtgagctgtgacctgcagagggggtgtccggccaaccccacacaggtacttaccgatgtgctggctgtaacctgtgagctagagctggcgggtgcaggggaatctgaggaggtggagagctgtcgcaccaagggactgtgtggaggatggtgggtggctgccaagtagctcgaactgctcatgtctgtgtgatgcttcaacactgcagaagtcaacagaaaagagagaaatacatggctatcttaaccagcgttacttctaacacaagcttggaatggcagcaatacatactaaaggcaaaaatgttttctatgcctagaggataaaaaggtgaagcacactagctgtgggaagtaggggcagggcagaggttgctgtagcagttaagaagtgacctccatttagaagcagtagcgtccctctactctgctttcctagaaagtgaaggacaaagctgggggtaattaagagaagcctaggctgccccagaaagccctgagcaggtgcagttgcaggtagaggtgccatgggcctggccctaccttcacttctctcagatgaatggtctcgcaatctcattttgctgtggtttgggtcatgcacgggtggtggtgggttgagcaagcgctctgcttttggcgctgtcactcgctccaccatgggcacggcccccacatcgtctaagtgctgcctgtgggtcctgtcaggccgggtttggtgatgggacagctctgaagaggggaacagaaaaagagctgtgaaatatgtcctctcaaatattttcttattcgagttccaagctctcgagttctctctaggccaacgccgtatacccagggcagcaggacagtccttcaggactgaagtttctagtaatttgcacaatggctaggataggcacagggagcccagaaccagagaaacatgtcaccaggatacagaagacacctgcccgtagatgaactcaatgccatgccattgctggctgttcactgagcattttgggtcttgctccaagatccatggtgtctagaatagctcccgaagtccatctgagagcatccaagacaagcagaagcagtcactgtgagctgaattttttatcggtcaactgcctctcccaaccccaacatgcatgcaaactacaaatttgagaatataaaaggaatgaaaagtcactgatactctgggggacttcccggctccctgacacttactggctgttgttaggaaggagctgaccaatttgtgcctgtccttacgagctgaatctggcagactgcccggcatgggtgctctgtgcttaagcgataactttttgggaggtttgattttgtcaaaaggcttgttctgccactgagatttcagcatgctctggaaatgcaggcttgtgggaacatctgcaagaaacataaaatgctacaggttagtccaaacacctggcctctctagtgttcaagacctacactccatcctcctttaatttgcccagtggcctgacacttggcagggcaagtgctgtcatatggaagatctgtttacgtgaacattactgaaggtcattcttctatttgcaagcaggtcactttagctttttactttcaagtcccaaagggaaacaaaacaagacacctttttggtttggttgatggagtttttgttcttgtatccttgtttgttgaatttactggtttgaaaacatcctgtttctattctagagatttaaaaacatatttaagcctacttcttttctatcaatataaagttaatcaggatgcaattattcaacaatattcattatctatgttatcaggcactgtactgagtactacatactctctccaaataagaactacataccattctctctttccttcctctgtggctccgccaattcccatcatgagattatcggggatttttagctgactggttaatgttcaatatcacaaatcaacatcttttggactgaattttttatgctgtttcttatctttccattttcttagatttttcccaagaatatatccttgagcaattcctttagaaaaggaatttctagatttaaaccattttcctctcaaacatttaaagctattcaattcttccgtgtattctaatatccagtgctatatttaagagggaatcggattctttcttacttgtaggtggtctggtttttgccttttaagcttctgcaaaaaacaacaacaaacttgtggtattacactgactctacagatcaatttggggacaacttccatgtgttccaccaccaatactgaatctttcaatcgactgacgtggtatctctctctccatctatttacgtttgtcttgattttctcttgacagcgtttagttattgttgacataccggtcttaaatacaatttgttaagtttattcctaagaattaatgttttctgatgggcagaagttggaagagtttgcagggttcagaagaagacaggaagatgagggaaagtctggaacttcttagagatttgttaaatggttttgaccaaaatactgatagaaatacgggcagtgaaggccaggctgacaaaagtctcagatggaaatgattaaagatagtaccttttaaaatttcaacttcagttcttcattactagtatatagaagtacaataaactgctatataatgaccttgtagcctgtgaaactacttcgttatagactttttcttgtttattcagtaggattttctatagacataagtacatcatctacaaatggagactgttttaccttttctttccaatctgtattccttttttacttcttgcctattactctgactggaacctctggtgctgatgtacaacttttagattttccttttcatgttttcaatattctgacatttcaccaccatggatagcggtgtgagtctgttttcaagcttctgcaaagctttccagggatattcaaatctaaaagccagcacatttttcctcacctcccagttcctcctgggaatcggtaaccacttggggcatgctcagaagttcccgccagagtccctatccactgcttcagaatagaatgaaacaccactacttcaaggaagaaggctctggtggggtgagaggacaggaaaggaaaatctaacctagctattccaaaatgagtccaaatttatcacccagacaaatgcccaggtcctatcactactccttctgccctttaattctgggtcaaaaacctcctgtaatcagttcccacctcacagcaacttactcctggcatgtgctttgggctatctttctatttatttcttcacagttatcttgtctttatccatctttcaaaaataattacaaattccagtcactgatagcatgtcttctagaactattagaaatttattttgtgtgtgtgtgtgtgtgtgtgtgtgtgtgtgtatatttttttttttttgagacggagtcttgctgtcgcccaggctggagtgcagtggtaccatctcggctcactgcaagctccgcttcccaggttcatgccattctcctgcctcagcctcctgagtaggtgggactacaggcacccgccacctcgcccggctagttttctgtattttcagtagagacggggtttcactgtgttagccaggatggtctcgatctcgacctcgtgatccacctgcctcggcctcccaaagtgctgggattacaggcgtgagccactgcacccggcctgtttaatatattttctaaaagcttatggggttttgggtcccatagagcacagaggatatgctcaatctgaactgaggataagaaggcagggaagagacgtctaaattaacattactgaacccattattatctgccaggcactgtgtgtttatcatcatgcgtgtgccacttaatctttgtaacagttccatgaggcaaacacaattatgcttattttaaagatagggaacaggtgcagaaaggtacattaactatgtccaaggttacatagtttaatgagtaacaaccaactttcaaactcaagattatacaaccctaaagcccatactcttagacaatataccttgaggctactcactgatccagaggatggagaggattctgtagtaaagtcaattatttctcaaattactcccaagaaatagacagtacaaaatattttccaagccagttctgcagagtaaaagaaatttagccactcctgcctatggtatagatgatgaatttcatgacactgaatgttatgccttcgaggactgaatgttaggccttccaggactggaataaaaatctgagttggggaaaaaaaaaaaaaaaaaaagctaacattctcagggatgatttttcccagtgggtaagcaccctcagctccatgattgctgggctttatgacagtgaaacaaattaggaaaactattaaagttttaatgaaaacaaacatttgctacctgtccaagtgtaaaaacacagtctctgaggacagtgctgtcttctcaaacatttttcataatcactcttttccacacttaaaaactcagctataccaaatcctaggaaataaagcattgtctagaagcattcggccctgtaaaacaatctgaaagctgggctgagctggaatgtataaaagaggctcaagaaaggagacgaggtcacttctgcccatcccacaatacccctttgtcagcagaagagttactcccacttggcaaaggctgtgtatgttttgtatatatatgtaatggaactccaaaaaacatagattttattttttccttttattttcccccatcgttctcccaaatctgaaaatgaagccaggaaaaaaaaaagggacagggatatgagagacctggttatagtgaaaacagcaatgactagaaacaagtaggcctggattcaggtcctggttctatctcgagtagaaggagaaagcaagaacaaatcattcagctgggctttagttccacctgtgaaatgaggcagtggggctagatcagggctggcaacattctagcattcattctctaaccctcctgttgtactggaggtacaaacacagctgtctttcctgttgtactggagacctcagattcttcccaaacaatacattaaataactccagacagttactgtcaattcatttgaataggcacaagaaaggacatctatttgttactgctagattatatgactgctatgagtctctcaactctaaaatgtttagtcaatgactcttcaactggaactccactcctaaacccttcccctcaactaaatgctcttaagtgcaagttggcacattgtagaacccaagtcatggaacactaccttgtactctccagttgacgtattaagcggaatcaagagcgattcctctttaaacccagtataaacagtttaaggaactccagctgctagactttgttagaagtttgctgtgttgccttttaattgcttccatgttaagagtgaacaggaacccagttagatcccccagtcagtaaaaaaaaaaaaaaaagatatcttaggaattgctggttgagttcatatactaactagtaagtgataatacctaggttctgtgaagagttaaaaatctaaaatagactggatacgggacctgaaagtaagcaaaaaaagggatatgaaatggaagagaacacaccagagatccattcagctagaggtctcctacattccatacccacataggtaaactgctattttcagagaagagggtgctgatccttatcaggtaaataacaggaaaataagacgaattactaatgtcatccttaagttactgtttcctcaaacaaaatgaaagatgaatgagaagaccctgacttcaggatgactagggtctgacattccacgattcacctggctgtctggctccttactttccaccattttctcaggcgcactttttccgggtgttttgtaatgctcacttcttcctcctgctgggaagttgctgtagcctcatgtgcagggtttggcaagctctctcaaaataccacagatcttcatggccagcaggtggtgctcttattaagccccttttataaagttaacaagcttttctccaaggttatatatcctctacatttccaactaaggattaactggatttgattacttgaggtgataaaacaaagcccccttcctgctggaatactaacaggttattataccctagtctctccaccttccacagccaggcgtagagttggctataacacagtccctcaatttctatcacccacacacacttaatgagaggggctgaggtacagtcaaggtgcgaggcacaactccaggatgaaaagcagcagttggttgttattctaacaaactacacaaactggttaggaaacagcactaaaactacttaaaaaaatatctgtcctatggggccagaaaacagctaagtatcacattcaaacaattttctgcctttatgtctggtataaatgtaactatatggaatcaatgaatcaaaatcatttttaaccttgttatgaaaaaaaaaaaagttggaaatcctgccactttaaaacatcttctagagaagaggttgtaagggtggcccagtagtaaaatctaccacacaaatgtttgacctacacagtcgtatgccaagctgctagccttcactgttatttactgctatacaatgatgtacagggaatcccaagacttcagggggtgtgttatttacacgggatattatgtgaatggtgccctttggagttggctatctctgcacccatgggaatcttctgatttccaaatggactgcattctgaatgtggcagttgtttgggtcaaagcaaaattattccaacaggaataatattagacatggtaatcaggtcttcaggtcaaccaactgaggtgtaattaatctacaggcaaatacagtagttaatagagcctacatgtaaaaatatatatatatctccacagtctcataaggagaatttaatgaccaactttttcgtccaaaccccagggccatagctagaagctcttcgtgtgtgtgtgagacatagacagaaaaacaaataggattagatgcaggaaaataaaaaccataaagaccagaaaagggggagtgttccctatctttctttccattccccctcattgctgcctgtagttgctctgaatgatggtgtgggaggtgtaaggtatgcggcagggcagcattcatgtcagatctatagtgtcctgcagtcagcaggacagaaaatgttcaagggaaatggaacctcttagtagagatgctgaatgatggaacaggagctgagagacacacagtctgggtatatctgagggtgggggaggttatttgcaactgtatgtggtaatgctgttgacaaagaaatgactgttctgtttagcaggtgatatccaatgagtgtgcttaagtgtccgggcttcctgtccttcttcaagtatgagactatacaattcaacacagtaattcagagagtaacccaacaaacattcctaagtcttcctagtggcgctgtctgtagccagaatcccaaaaagggtaaaaatctgactcctcttaataatctgtctggaaaggaacttgaaatatagtaaaaggaaggacaggcatcagataatctgggtctgaactgtgaaggcattcaaacccattagccatttagttttagataagccacaaccttaccaagcctgttccttgagcactaacactgaagtaacaccttacaaaatttctgggccgggcatggtggctcatgcctataatcccagcactttaggaagccaagatgggtagatcgcttgggcccaagagtttgagaccagcatgggcaacacggggaaacctcttctctactaaaaatgcaaaaaattagccaggcatggtggtgtgcacctgtagtcccagctacccactgaagtgggagaatcacctgatcctgggaggccgatgctgcaatgagccaaaaaccacaccactgcattctagcctgagtgacagagtgagactctgtcaaaaaaaaaaaaaaaaaaaaaaaaaaaagccaggtgcggtggctcatgcttgtaatcccagcactttgggaggccaagacgggtggatcacgaggtcaggagttcaagaccctcctggccaatatggtgaaacccccatctctactaaaagtacaaaaattagccgggcgtggtggcgcgtgcctgtagtcccagctactcaggaggctgaggcaggagaattgcttgaacttgggaggcggaggttgcagtgacccgagattgcacgactgcactccagcctgggtgacagagcaaaactgtctcaaaagtaaaaaaaaaaaaaaaaaaagaattttgaaagcagcatatgagacaaatatgagaagagtactacaaactttaaaatgctatacaaatagtaactgcagttacatgggctacataaatccaatggcaagggaaggtaaaagtcagtgactctggaatctgaagcacagaggaaaatgttttagtgttttccactcattgtgttcaagtttatttattgctccaccagctcctgactatccatgtgttccaggttttctgtttcctttctcttacaagaaatcacatggccacaggaatattacaccacatccttatcacagctagggggttttggtaacaaaagccaaaaatcccggtatctactggatttaggtggccagaaatgcaatcatttgaagaacagatgcagaacaggggattatagttatctaatgtttgatcaactgtcaattagaaggattctctctaggacaagggttagcaatgattgtttttataaataaacttttgttgcaacacaatcaggttcatttgttcacatattgtctatggctgcttttgtgctacaatgacagggttgagcagttgtgacatgaactgacatcaattatatggcctgcaaagcctaagatatttaccatatggcccttgaagaaaaagttcaggccgggcgtggtggtttacacctgtaatcccagcactttgagaggccaagatgggtggatcacttgagctcagttcaaaaccagcctgggcaatatagcaagaccccatctttgtagggggcgggaggcggggaagcaggttgtggtggtgcacacttgtagtcccagatacttaggaggctgaagtgggaggactgtttagagcccaggaagtcaaggttgcagtgagctgtgatcactccactgaactccagcttagggcaccgagcaagaccctgtatctaaaaaataaaaattaaaaaaaaaaaaaaaacaaaaaaaaaacttacagactacctgggagatattatgaagaacagcatggagcccttatcctcagggagattacatcccatcccttccccactccccccgccaccaagacagggtctcactaccgttccccaggctgcagtgcattggctcaatcatggctcactgcggccaagacttcctgggctcagctgatcctcccacctcagcctgctgagtagctgggacgacaggcgtgtgccaccacgcccagttaattcttgtgtttttagtagagatagggttttgccatgttgcccatgctggtctcaaacttctgacctcagatgatgaacccgccacggcctccaaaagtgccaggattacaggtgtgagccactgtgcctggtccctaaaatttaaataacagaaagcaaatacacaaacagccataacataattcattaacatattgataaaacacaatagggtaggtgcagtggctcctgactgtaatcccagcactttagggaggccgaggcgggtggatcacctgaggtcaggagttggagaccagcctggccaacatggtaaaaccccatctctactaaaaatacaaaaaaattagccaggcgtggtggcatacgactgtagtcccagctacttgggaggctgagacaaaactgcttgaacccaggaggtgggggctgcagtgagccaacatcacaccactgcactacagcctgggcaacaaaagcgagactctgtctcaaaacaaaacaacaacaaaaacaaaaacccaccagtgatttgagaggaaattcctaccttctgtaggctgggcacagatcatgagattacgtgaaaattcaatgaaaccaatccagattatgaaagcgctggcttccatctagaatagtggtttcaaaatgtctttgctcatgcacccccatttgatatgtgatttttaaaaaatcataatttcagatagttgtaaagattatatttgaatactacataatgctttaaaaacatttttatcaaaactttggcatgtaaatatatttagcttcattaattgaaaaaaaaaacttcttttaaacttatttagctaatcagactttagatattaactcagtatttattctaagacagacaaggaataggaccatgtaactgagctcagacccatcccagccactcgaagagttagagggaaatctcttagttgcaatcttttagtggtaccctctggtttggtagatctgttgcagtctttttggagaattctaagagaagacttggttgataggagttcctgagttatctctattttatttttaaaattcaaaacttttttgcttaatacctgggagattctccttcaggtgctgagaactcttagaaatgatctctttatttgttgtccccaccatccaagacctttttttttttttttttttttttttgagacagtcttgctctgtcgcccgagctggagtgcagtggcatgatcttgactcactgcgacctctggcctccaggttcaagcgattctcctcccaaataactgggattacagacatatgccaccacgccctgctaatttttgtatttttagtagagaaggggtttcaccatgttggccaggctggtctcgaactcctgatctcatgatccgcccgtcttggcctcccaaagtgctgggattacaagcgtgagccaccacacctggtctcgaactcctgacctcaagtgatctgcctgccttggtctcccaaagtgacgggattaaagacgtgggccacgacaccgagcctcaagatttttacactctggggcaagacccatagtgggactcaatatggccaaaaggaatgctcttcttttgtcaagtgggagaggtacaggtatgggaagggaggtgggaaaggagggctgtcagacacagagatttaacagggaggcaaactttagaaagacagtacaagctaacaacgaagatttgtgcttatctacaccctgcaaagctgtcgcgttaccacataaatgccagtatgaagatattctcctagaacactgccgtccatcctacattatatcatggcacgcacagacaaaacttttttttttttttgagacagagtcttgctctgttatccaggctagagtgcaatggtgcaatcttggctcactgcaacctctgcctcccaggttcaagcaattctcctgccttagcctcccaagtagctgggattacagacaggcacaaccacgactggctaattttttatatttagtagagacggtggtttcaccatgttggtcaggctggtctagaactcctgacctcaggtgatccgtccacctcagcctcccaaagtgctgggattacaggcgtgacccaccacgcctggcccagacaaaacatttttaaagatatactaagcgtattttggaccagattactgtggctagaggcaactgagcccagatccctcctagctacttgaagagttagaaggaaatctcatattaagttgcaaccttttagtggcaccttctggtttggtggatctgttacagtctttttgcaaaattctaagagaagacttggttgacgaaagttgtaccttgaaagtatctgagttgtaactgcaccttggctgattttctttcacctagaagtctctcaagtttctttcattagactttctagtctgtggtctttcttaccatctggaaatgctagaacaggatgaacacaagagtccaactgggaaagacgttccaacagaggggcttcatagtgaatttcgggaggcatggtgttgatgctgcctgaaccacacagtgcgcaggagggattcacatcacagccagggcggattgtgctgttccggtgaacctgtgaaaaaagccaaacaaaactgacaattcagcatctgataaaaagccagctacccatttgttatccccatttgttattgagaagttagctccccatttgttattgcgaagacctttctagatacttgtgtgacactactaaaaggatgtttgattagtttgttaaaagatttccatttgtctaacacactgaccttcaaagtgggtaaggaaacttgcttccttttcattgatgaaatctaactacttgaagctctaagtgcttacctaggtatcaaacttctgacagtttaaaaagatactaaaactgtgctttctgagaacactttataaactctgcatgctttcacgaccttgatggtccgctaagacgaacagttggttcttgattcccaggtgggacattacttgctttcttcagcaaatttatccacctaggagccttcaattaccaaccacacctcttctcttcttttcacacctcttcttcaaaagactttcaggtggtctcaagccaggtggcaagcttccctgaagcttgtaacttaaaagtaacttattaactactctttaacctggcctaaaatccactgttacaaagctcatacctaagtaataaaataacattttgtacagcaaatgctcactttcatagtcttcatgttagattaattccaaagggtagaaattatttccactgaacttcctttgtgcacatgtgggcagaataattgataacctctccaggtaagtccaaagttaaatatgaactaatttaagtcttcaaaagattgaattctgtataaaaactgaacatctacaattttatactttgagcaaatttcaggtcatgctgaatgcaggatccctacattctagtgttaggatgaacaagtctggcatttgccaaagcctaactcataaagtcacctggacacacagccccagaaaaagaaacttgcatgttgaatggcactataagaaggcatcctaggtgcaagctcagtagtagaacaaagacaaaaagcatcaaaactctactagcaaaaactctaacatttactagagctccatttattttcagcagagacatctcgaaagccttttatggatttgtgtaagagaaagatatacataagaacaatgtggtctttatcaacattcccccgacattctattgtaaccacatagagaggtggcacgcaaataaagtcttttaaaggttagactgggcaaatcacacagaactagaagccactgaaagggagtgataccaactaggcatgctacttttgtgtagacaatattaactggtattgttttgggaaaaaaaaaatccctgtatctatgtaatcagagctggctttctggagaggatgacattttgaggtaaagagaaatgagtaggtagagatgaaaatgagatcacacagtgggtgagtgggaggatttaggaaaattggttaggatccaaaaattacactgaaactttcaatattcaaaagagattatctcactccagtaggtatagcaaataaaaaataaaaagagagagactagaaaccaacccatgacatcaactagctctccatatgggacatttaacaacactacattttatggctagagtgtatcacttaagtcaaagtcaatattgggaggccaaggcgggtggatcacttgaggtcaggagtttgagactagcctggccaacatggtgaaaccccgactctactgaaaatagaaacgtcagctgggtgtggtggtgggagcctgtaatctcagctactcgggaggctgaggcaggagaatcgcttgaatctgggaggcagaggttgcagtgagctgagatcacaccactgcactccagcctgggcgacagaatgagactaagtccaaagacaagcaaacaaacaaaaaaacaaaacaacaacaataaaaaaattcaatagatgtggctaggcgtggtggctcacaactgtaatcccaaaactttgaggtgggagagaggattgcttgaagccaggagtctgagactagcctgggcaacacagtaagactccatctcttaaaataaaatttaaaattaaaaaaaaaaaaaaaaaaaatttagcccagcatggtattgcatgcctttagtcccagctactcaggaggctgagggagaagaatcgcttaagcccaggagttcaggttatagtgagccatgattgcaccactgcactgcagcctgggaaaaagagtaagatcctgtctccaaaaaaaaaaaaaaaaaaaaaaaaaaaaaaaaaaaaaaaaaggctgcgcatggtggctcacgcctgtaatcccagtactttgggaggccaaggtgggtggataacctgaggtcaggagttcgagaccagcctggccaacatggtgaaaccccgtctctactaaaaatacaaaaaactgggcatggtggtgggcacctgtaatcccagctactggagaggctggtaagagaatcacttgaacctgggaggcagaggttgcagtgagctgagattgcaccactgcactccagcctggggaacaagagcaaaactccgtctccaaaaaaatttaaaaatttaaaaaaataaaataaagggtagaaattctacttataacttgacaaaagggtaatgtgcacacatgtaacttaaacagtaatctcacttttaaattaaaaactgtaaagtactaatagaacccgaggagtatataaaaatatatttaatacttattttttttttgagacaagagtcttgctctgtcacccaggctggagtgcagtggcgcaagtctgccttccaggttcacaccattctcctgcctcagcctctcaagtagctgggactacaggcgcccaccaccacacccagctaatatttttgtatttttttagtagagacagggtttcaccattgttagccaggatggtcttgatctcctgacctcgtgatctgcccgcctcggcctcccaaatgctgggattataggcatgagccaccgcacccggccaaagatatatttaatacttattaaaggatacattttggaaaatttttgaaagaaaacttgaattcatacccatgttgcacaaatccacaccaagaatctatcctgcagacaaacttaagtgtacacacgcacacgctcttccactgaaacaagatgccaaatcatctgcatgaattcatttaagttaaaaaacaacaagaacacatacaatattgtgttttacaataagaaaacaaatttttaaaaatatcacaacagatggtgtgcatgtgtagccctagctatttgggaggctgaggtggctcacttgagcccaggagtgaggagctatagtgatcatgtccactgcactccaggcctgggagacagagtgagtcagtctcttaaaagaaaaaaaaaacaaggatctcctgggctcaagagattcttctgccttagcctaccaagtagctgggattgcaggcatgcaccaccacgcccagctaatcttttatatttttagtagagacggggtttcaccacgttggccaggctggtctcaaactcctgacctcagatgatccacccgtatcagcttcccaaagtgctgggattacaggcgtgagccatcgcgaccggtcccagtcatgaaatcctattggcagaatccaaccacttcataccacctcaactacactcaatctagtccaagtcactatcttttctcaaatgggtttcttcaagcctcctaactgatcctcctcctactggttcttacttccaaatcaatcaacacagtaatcagtgtaaatcttgttttaaaatctcaatcacatcataccaacctcataatcttccaaatgacttctcatctcacgaggaatagaaaccaaacttcttgcatggttcccacaaggtcctatagtatttgtcgcctctatcccctctctctgacttcacctcatttttttgttactctcctagctgacactaccagttactctgatttccttgctatatttctccaagatagcaggcaaccttccagatcacaggcctctgcacttggctcttcaaccactaattccatggtcattctctcacatcgtgtctttttctttaaatgtcagtattcaaagtaactttttttttttttttgagatggagtctcgctgtcgcccaggctggagtgcagtggtgggatctcagctcactgcaagctccgcctcctagcttcatgccattctcctatctcagcctcccgagtagctgggactataggcgcccgccacaacacctgactaatgtttgtattttttgtagagacagggtttcacggtgttagccaggatggtctcgatctcctgacctcgtgatccgcctgcctcagcttcccaaagtgctgggattacagacgtgagccaccgtgtccggcccaaagtaagttttatttagaaatacaagtgaaaggccaggcgcggtggctcacgcctgtattcccagcactttgggaagccaaggcaggtggatcacctgaggttaggagttcaagaccagcctgaccaacatggtgaaacctcgtctctactaaaaatacaaaaaattagccgggcatggtggcgggcgcctgtaatcccagctactcgggaggctgaggcagaagaatcgcttgaacccaggaggcagacgttacagtgagctgagatcgcaccactgcactccagcctgggcgacaagagcaaaactccctctcaaaaaaaaaaaaaagtgaaaaaagattatattcttgactgtaacaacaaaaaatgccctggaataagtttaacaagaaatttaagcacaaagcttaaagatattgatattctacaaattaatgcagaatcttaatagacttgaggggggaggggagacaaggcaaaggggatttaaacaaataatctaaaagatacaactgaaagaatgtaaggaaccattccccaaaatttctgataagcaaaaatacaggggagtgatctggcctattacatgttttatagttacagtaattaaaataatctgccctcggttaagaaacagaaaatttaaataaaaacaaaaattgaccaaagtatatatgacagtttattgtttaactaaaataatacttttaaatcagtttaaaaaaacaaaaggaggtattactttttcaacaaatgaatcaggaaaaccaagaggtcatacagaagaaaacggctgcatttctgcctcacaccaaaattaattctaaataaagatttattcattttcattttattttatttttttgatacagagtctcgctctgttgcccaggctagagtgcaatggtgcgatctcggctcactgcaacctccatctccgggttcaagtgattctcctgccttagcctcccaagtaggtgggattacaggcacccaccaccaagcctggctaatttctgtatttttagtagagacgggggtttcgccatgctggcaaggttggtctcaaactcctgacctcaggtaatccacccaccttggcctcccaaagtgctagaataacaagtgtgagccaccgtgcctggccccaaataaagatttaaatataaaaacaaatattatactcaaatctaaaaaaaaaaaaattgtgaagcaatatatagtggttaacagtatgagctgtggagccagactgcctgggtttgaaccttgactccgccacttactagctgtgtggccttaagacaagttactgtgtcttcatctttactaacaggagagtacctgatagagttgttttaaagataaataactcacaacagtatctggctctcgactcttaatcacttttgtaaaaccgtaagtatagctactgatagaacatttaccatcaaacttgatagaacatttaccatcaaagatcttgatttcaaaattctagcttcttaacactgtataatatgatcattgataagtcacatgacatccttaaattttctcacttgttaaaaaggactaataataccaatttcatgggagtgtaggaaagatcaaatgactctgtaactgttaaaacattacacaaatgttagctaaattagtataccgcatgatttctcaacagctggcacttctttgttgtggggcacagtcctgtgcactgtagatatctagcagcatctctgtcctcatggtgcatgtgcctccctactcccccaatttgtgaaaatgagtaattactacagatattgccaaatgtctcctgtgaggacaaaatcactgagaaccatgaggttcaaattacggtcatcccgtctagaaaaattcaaagcacaggctcccattaaatattagtggtgagtcacagtaaacataagactcagtaaaaaaggaaaacaaaaaaaataaaaattaatagtaagaacaaagctctcaaagactattgtcaagaacaagcctgaagagagcttcccctaccaaagatcagataacgttagcatcataaagaaaagactacaatggcttgaaatacctcaaatatgtttcaatcaatgactcacagccccttcatgaaaaacttcagtgactgtccttagaggatagtagaaaactaatttgttattttgaaaattggtaaataaaaaaaaacaacaaatcatgctttcttctgtacaaactgtacctcagggtaaacaaatagttgaaaaggacaattttccctttataaacatattctatctagctaataaaagaaaaacagaaatgatacaagtagaatatcaccattcttcagcttccaatttaacaatgggtccaggcaatgatcaccagtggttgataacaaacagtttagtcattacgtgtcttctgatacaagcataaggcggccaccttgtgttttctcacgaaactaaaactggacttattcacgtttctactagttttcaagaaaaacaagggacagaaaaacatcactgttttttaaatgcactaaaaataagatggattaataaatggaaggatgattgtatgctaaaatgttagtggtagaacctagggagtagctacataggtgttcactgtaaaattcattcaacttcgtatctgaataatttcataacaaaatttggaaaagaaaacagtgacaccacaggacttctgcttctagcagagtaatagtgatcagatttacctttcagtcataaaccagaaaactggacaacaggcagtataacactgagaaataaatggggtggtctctaagactgccctggttttccgtctggaagtacattctagactgcagggcagggagaggatctgaagcagagtataatagcttcactgagttgaggaagcaaattctcactagatcagaattcagagactaaggaaactgaaaattgcaaggcaaaattcttgagaggaggaagctttacagaaaaagagccccagaaatcttcataagatccccctgagtgtttgctaaatattaaaaggtgcatgtaaagggtgaaactatcaggccaggcaagagcaactaggcagctgtgagctgaaatggtttccacagctaacacaagcctgagaggcttttaaactgtgaccagccaaagttgcatagagaattcaagacagaagatcctgctttagttgtggagctagactactaaggtggccaactcctcacctgacctaacaaatgacaaggaatttacctgccagcaaaacaaagcctctttaaaggaagatggcacaatccacatgctacaagcagggaaaattattaattggattttcagcttaaaacataaataaaacattgttagatatgccaagaggcaagaaaatactactatagggataaaatttttaaaagaaagtaggctgtgggaaactaaggtatcagataaatgaagttttctcaacaaataaatcacctatatggatagcttgtatcaaaccaacactctcactaattggaaaagccagatttaaaacacacacacacacacacacacacacacacacactctctctctctctctctctctctctctctctctctctctctctctctcaaaacataagaaaaatgctgacataatgacaatattgaaagctaagattccagagaggaaaagaacctggccaacatggcgaaaacccatctctactaaaaacacaaaaattagctaggcatggtggcacgtgtctgtaatctcagctacttgctgaggcaggagaatcgcttgaacctgggagatggaggtttcagtgagccaaggatgtgccactgcactccagcctgggcaacagagcgagactccatctcggaaaaaaaaaaaaagaaagaaagaaaaaaaaaagagcagagcttttggtactcttgtagggctgaatggataacactagagacttgaaatgtcaaattatcaataaaaagaggacagggaactaagcatgacacacttccaagtaccaccctcccaaagaaaaagctgaagttgtgaatggtaggaggctacaaagctaagtggaaagtctctgaaaagggcagagatgtttctggcagtctcgtgaggagactagaattagatctcaggatatgctaagaggaaaggaggctgggcacagtggctcacacctgtaatcccagcactttgggaggctgaggcgggcagaccacctaaggtcaggagttcgaaaccagcttggccaacatggtgaaaccccgtctctactaaaaatacaaaaattagctgggcatggtagcacgcgcctgtagtcccagctacttggaaggctgaggcaggaaggagaatcatatgaacccgggaggcagacgttgcagtgagccaagatcatgccattgcacttcagcctgggtgacagagcgaggcgaggctctgactccaaaaaaaaaaaaaaaaaaaagagagagagagagagagaaaaggaaactgatcaacacatgttctcagctggaactaagagagagaaacagactgttatctttttgagacagagtctagctctgctgcccagactggagtgcagtagcttgatcttgactcactgcaacctctgcctcccagcttcaaaccattcacctgcctcagccacctgtgtagctgccaccacagctggcttttttatttttgagatgaagagattgcaccactgcactccagcctggcgacagagcgagactccatcttgggggaggggagggggacaaaaaacaaacaacaacaacaaaaaatcagcctgtgcaacacagtgagacctgcatctcaataaaataatgagataaaatacttgatacacgaagaaattcccacgttcccttaattaatactgcaatgctatcaattctctttgaaggaattcccaagaaatactcaatttaatacttatgaaggaattaataccaaagtaaaactctattcaccattttctgttaatcatagcatattcgtccaaaacactaaaagaattcttttggctcaaggacaggttataatcatttgcttttgctttgcatttgatattcgttatctaactcatccactgttaacatgtggaaagattttcaaaggtttggcaactctatcacaatcaagcatatcccacaactggctcttgaagatccatcagagtgaagaaacaaaacgtgtaagcttctattttatctcagtctttcaaaatttattttgtatgtgttttataatgtatatataaaacaccgtcataacagtttagaggtaactgttccaagcacagagtgatttctgagtattcttttagtagctttatgtcctaaggtacaattttctacatggcatgcttgctcctttccaaatgtctaactagtatgaaaaagttggttgggcctccaaggtctattgcactctgtcaaggaagaacgtatcaaattattaacttttaatactgactcatattctagttcattagtcctcaaccatggtgtcatgaaactggatttaaataggtggaatcaaaactaggaggcctagaatcatatattaacacctttatttaccctgatgtctacaggaaacctggtcatagccatgagagaatgccctgtacaaaaatgtcactcttcaagtgtgatacaatgggaagaagaggaggactactcggaattctatggaagccagctttaaaatttggcccagagcaatcccccctatgacaacaaggactacaaaattctaaaatgatgccagtacactgccaatttgttaggaaattgctactttttaaaaaattgaaagaaatgctattaagggcaataaaaatttcaagggtatgttagtaataaatgtagccattacctattctactggttattagtacaaaaaaacccagccttttcaaccattcatttccaaacactgatggtttccactgccagactatacacaagtttctaatggtccacagtaaattgagaatgagaacaatgcagtaaattattaataaaactacattcttttcttttttaaaaaaatactatttgtcttatggtttaattataaacataattttacttaaaaaataaaaagcaaccttatttgaaaattggctggtaccaattttattttaataactttattgatctgaaatcttagtacgtttaggttaagttataaacacctacttcacttaggcactgggccaggaaaagaacataatggcatataagaactttccactggagtgcttcttcattcacttagataattactaacatccaccatactagacccctaaagtgatgaaacacacaataaatagcaatataggctattcagtaattacaactagtaattccgtcattttataataaaattatgatttaggaagtactccatgttctccatgagccttactctgatattcacttaccacaccctagtggttattccttagattacatttaaaatattccacattcagagttgtagaggccttagactattatctcctccaggattactactgttagtctgtctttccacctccagtctcttgtgccaatccatcccaaacataatagttacagattggccgggcgcggtggctcacgcctgtaatcccagcactttgggaggccaaggcggatggatcagctgaagtcaggagttcgagaccagcctggccaacatggtgaaaccttgtctctactaaaaatacaaatattagccaggcgtcgtcgtgggtgcctgtgatcccagctactcaggaggctgaggcaggaaaattgcttgaacccgggaggcggaggctgcagtgagctgagattgtgccattgcactccagcctgggtgacagatcaagactccgactcaaaaaaaaaaaaaaaaaacaaacaaacaaaaaaaaaaaaaaaacatgttacagcagatttacctcccccaaaatagcttacaacacttctctgctcaaaaatttaaaacttatagactgaaacccaaatcatcagtttgggcattcaaggcttcctatttatttactgatagatctcatttctctttattcccaacgagtttaacttactgaacactttgttttagtcattgattttaagaagtacaagtgatataacaacagctttttttttttttttttttttttagatggactctcactctctcaccaggctggagtgctgtggcgagatctcagctcactgcaacctctgacttcttggttcaagcgattctcctgccccagcctctcgagtagctgggattacaggcacgtgccaccacgcccagctaatttttgtatttttagtagagatggggtttcatcatgttggccagggtggtcttgatctcctgacctcatgatctgccccaccttggcctcccaaagtgctgggattacaggcatgagccactgtgcctggccagcctttttaagggcaaaagagttactgcactaaacgtgcatctcaattttaagatatattccagccataattcaactaagctgatagccctttaaaaacacagtaattgggctgggtgtggtggctcacgcctgtaatcccagcactttgggaggccgaggcgggtggatcacttgaggtcaggagttcgagaccagtctggccaacacggtgaaacctcatctctactaaaaatacaaaaaatagctgggcgtggtggcgtatgcctgtaaccccagctactcgggagaatgaggcaggagaatcgcttgaacccgggaggaggaggttgcagtgagccgagatcgcaccattgcactccagcctgagcaacagagcaagactccatctcaaagaaaaaacaaaacaaaacaaaacctcaatgagttccctcaagtatgttttatttggttctggaatgcagtagagatcatttaagatgcaggtaaggaaaaaatattaatcacttgctttgtgtgttctgtactctgtactcacaataactgtgaactcactgtcatgtaacaatattagaacataatttacctgttaacttctttgctgtcattagaaagtaagctccatgaagataagggctttgttttccttaccaatgcaacctggctgccctgaataatacggtgggcattcaaaaatgctgttgaataaatctgtctggaaaaccgagcaattcaagatgacagaagacaagatgcttgctcatcagcaaataccactgaggtcatgtcatgagtgaggagccatgtgagacacagaaagcaacctagacagaaggaatggggtgtgtctctaactctggaagaactccagctttctgctagatctagtacatggtatatttcccaaagtcaactaatttctctgtcttatttttcatgcagcttacttttgtgtcaggatgattctgttttagaaagtggcattggaacaaaaggatatttagttttatgcctatctcttgcctaagctaccttttataattttatatgtacattcaaaactacattcgttcttaggcatggatcagaagaaggttggctacttcacatattaaaaaacaaaatccaggaggccaccacatacttcagaaaatttttatacgactcctgatgtcatgccatagtggctggtaaactgccaaaacagaggaagggtgctttattttcatgaggtggcggttttttttttttttttaaaatgtaaaagcattctgtgttaaattcatcaaggaattgacaaaaagctattttcctacacttgacagtaatatactgttttctgacattcctgttatcaactcctctgaaaatcttttagagatatacgactattagtaaaaaaaaaaaaaaaaaacaaaaaaaaactgagactgaaatgtcaatatgaaaaccctgccaaataccttattcttatctatttctgctattttgatatttcaggtagagtccgaggaatagacaggaagaaatggtatcgcctgacagtcaattctacaattcttttctttaaagagaacatggcaaacttacacagtacaactgcatactagaataaaacaaggaaagtactgaaaattcaccatgcaaatactaattgttccagcaattctctcatctcccttatttgtcattagcaaatatgttgctagtggctctcttaagaaaaattcccattctctgctctcttttacagcaacattctttgaaaatgttatctacaatggttccctcaattccttctgtggccttgtctcctgaaaccactccaaccatgctttaattcacctttctccctctaccaaaactgctcaccaatgtctgcaacaaccccaccccactaaattcaatggtctcaattctcagccttcatcttactgatcctgtctgtaacaactgacacagacaatccctcctcctcctccctctccaaaacactttctccccttgcctttcacataccacactctcttggtttttcttctactttattcgtcactcccttcccaatcctttcctcatctttcacaggaatgaggaggaatacctaagctctggaatacatcaaagggctaatccatatacctcttctttatctgagctctccagcactctctattccctcctctattgcatttctctctccaggattttttttaattaattaattttttattattattatactttaagttttagggtacatgtgcacaacgtgcaggttagttacatatgtatacgtgtgttttttttgtttgtttttttgtttttttaaaagacagagtctcaatcactctgtcatccaggctggagtgcagtggcacaaccatggttcactgcagtgtcaacctggtgggctcaaatgatcctcccgcctcagcctcctgagcaaatggactacacacgctcgcccacagcaggctttttttttttttaaagatatggggtctcactatgttgcccagactggtctcaaactcctgaacgcaagtgatcctccttcctcagcctcccaaagtgccaggattacaggtatgagccactgtgcctagcctctctccaagatttaatgctataggacacactgcagagttcatttattattttctttctcttaacaactagaatatttcatagggtaagcacttttgtctgttttgtttagtgttgtatacccagtgactagacagatttagctcgttgcaggaagccaataaatatttgttgaaagaatgaatgaacaacaacaaaagtggtaacaataacagccactttgtacgaggaacttatcaaccagacatcccaataagcatgttacatatatttcattgaaccctcaaacaaccctatgagatctctgaggctttggagaggagtggaagtcagggtggttaacatgcaccaaattaccaaactactaagtggtagtaccatgattcaaacccaaggttatcatcttcaaagataatgctcttaattcctgcacagtaccaattttactggaatattattatctcattagttttggaataaaggcaactgctatttgaagagtcagcaatctaaaattccctacagttgtgaattaatctccatttcctttgtgaagacaaacttttttttagtaatatcaatttaaaaactttagtgaagattcctttttttctcaggcagggtctcactctgtcacccaagcttaagtacagtggcacaaatacagctcaaagcagcctcaaccttatgggttcaagcaatcctgcctcggcctcctgaatagctgggactacaggtgtgcaccaccatgcttaatttttaaatactttgtagagatgaaggtctcactatattttccaggctggtattcaattcctaggctcaagcaatcctcccgccttggcctcccgaagtgttgggattacaggcatgagccactgcacatggccaagattcttttttagggcaaaggattctatactgccattttcagtgataacagtgaaggtgagagggcacactattctccttcaaagtgttaagggcagtacttaaactttcagtctctcccatttctattaaaaagctcaagacagtggttttcaaaactagctgcagagtcaccgaggagctttgtgttttctgaaaacaagattccaacatccaactccagagcaaacagggcccaggaacctagtattttataaagctccccagaagaccttggtggttagccaagtttagaaaacaccaaagttggcaagagactaactctatctgagcatctggctcactgcttgacaatgaccaactctcatctgtaccgaccttcttggaaagaggaacgatgctgttgggtcgaacaagcctccgcttcttacagctcagtacaggacgtgtccgggctgccacacaggtgccatcagatgatgaagagacgagattcagtcgttgcttcttatgtaattgttcctcagcatcagagctgtcacctggaatgtggtctgccaagacaggctgaagactatacaaggggaaggaagagtattctcagaacacacaaagaaacaaaataaataaacaacaagaaaacacaaagaaacaaagcctcttatactagttcaacctctatttgctaatgttcagacacaaagaagcattctagagcagaagcaggtctcctcttgatgtctgttaatctacctgtgtgtgcttatgtgtaaggttcttggtgcacattaactacatcatgtctgaaagataaaagtcaataaataaactcaagttctagtgattgagttctcctctacatcaaacacacgagtaaataaagtctagagaactacagttggttagaaaatgatgaattttgcaaatgttaatgggcttccttagaatcagttctatgaaacccgaattttaagggtgttgtacacatcattcacttgtacagaatctccctgaatcttttgttttctcccttgaatcttcataaatacagatttacaaacatagcccttggagatctaatctgtcctaagcagaggaggttaatataagcacttctgaggaattcctgcaagattaaaacaataataattcacagtaactgtagtgtcttttattttactccatgcccactccattttagtaggtaaaaggaaaatatacaattaattaaaatgcactgcttcattatacagtgaagattaaaaatgttactaagtgataaggcttccgcttctttaaaccagggtcagtcctggctaaagagaactaagagctccaaaacacctttacaagtctactaagtgtaggaagtagaagagctaaaacttacgtgttaataactccattgacaggtctgagtgctccacatgatttggtagacagtgactctgaaatatgaccaataataggggcaccatggttttccaatggctgagaaacagactcaatctgattaagaaaaaggaaaaaagaaattaacatgtacccaagcgcacccctgcctgaaaagcaccaccacttcatttgcacaaagcacctaaaacttctgatgatcaatttgaaaaacacaacttgaatgactgaagaaaaagaaaataagagaatcagtggtcaggtatgatggctcgcaactataattgcagcactttgggaggccaaggcaggaggatcgcttgagaccaggagttttgagaccagcctgggcaacacagcgagacctcatctctaattaaaaagagagagagagaggttgacagagagaaggagaatattatattagcttttgctttggggggaagagggatgaggaatccaaatgtacagactaaaagtaagtacctattgacaggaaaatgacctcaataattctatggaacagaagcttagcaaaacaattacacagtaacataagctttcaactaatgatcaagaaggatatactaacatcagtatcaagatgactaagaggaaatttaaatgtagttaatatctgcttaactctaacagagtatgctagaagcttgttttctaaaaactatgctttgtttaaaaatatacacacaggccggggatggtggctcatgactgtaaccccagtattttgagaggcaaaggtaggaggatctcttgagcccaggggttcaagaccagcctgggcaacatgacaaaaccccatctctacaacaaaaaaatacaaaattagccgggcatggtggtgcgtgcatgtagtcccagctactcaggaggctgaggtgggaggaggatcacctgagccaggaggcagaggctgcagtgagccatgatcatgccactgcactccagcctgggtgacagagtgagaccctgtctcaatgaataaataaataaataaacacacacacacatttttccctgacagaaaacaaagttaataaaatctcaatgaatctaattatctgatgctatcagatactaactattgtctttagagtattcaaatcaaatatgtttagaatataaaatgaaataacagatgagaaagaatagaaaaagtgtgatttgcagtattcaaaacaaattatatatttactaggctcaaaacggataggaacagtatgaatgccagtcatatagcacctctgaggtataggcaataaagcaacagatgcagctatccctcagttctagcaattgttgaactatcccagaaaggctatgggtctttgactccttactttatttttttgagatgaagtctcgctatcccgcccaagctggagtgcagtggcatgatagcagctcaccgtagcctccacctccctggttcaagcgattctcctgctttggcctcctgagtagctgggattacaggcacacactaccatgctcatgtaatttttgtatttttagtagagatggggtttcaccatgttggccaggctgttcttgaacttctgacctcaactgatctgccctcctcggcctcccaaaatgctgggattataggcgtgtgagccaccacacctaacctgtctccttacacttgaactgactctggggcacgctgaagttctctttcctataaaagctttcaaggtaaatattcctataaatgcttcctacaaatgctttcaaggtaaatattttgaggctgaaattctacttttcaatactgatttcttttgtctttatacccccaaggataaaacaccaaaggactgaacctgaaagtagtcctagacaagcatcaaaaagaacagactgaggctgggtgtggtggctcatgcctgtaatcccagcactttgggaggctgaagcaggcagatcacctgaggtcaggagttcgagaccaacctagccaacatggtaaaatcccatttctactaaaaatacaaaattagttgggcatggtggcgcctgtctgtaatcccagctcctccgggaggctgaggcacaagaatcacttgaacccaggaagtggaggttgcagtgagccaaatcacgccactgcactgcagcctgggaaagagagagagagagactgtctccaaaacaaaacaaaacaaaaaacaaacaaaaacaaaaaacagattgggaagataatctaaaagttttaatacaaattatcctaaaatacagatcaaactatatacacagacaagtcatataagtatgctacaatgagtgaacaccgagaaaaggctgtcttttttgttggatatcctgtacatctactaagatatcacaaacatcttgaacaattgtcaatgctatcaaaaattacagtaaatctggcatagacacattgccttaagctctatgcagatttcccttggaaagcaacacggtattaagcagcaagagctataaggatattcctatcttctgacaaaatattctaaccaatttttaaaaatctaccctaaaggagtaactcaacaaacacagccccaaaaatcttattcacaaaggtggtcactgcaatgatatctatcaataatctaaatgttgtaagcattataactatagttatcagttgtggtacaccaaatcaaaatattaaaaagaatcataaaggatatttcttctcttatggaagaagagatttcaagagaaaaaaataatagtttaatatagttgtagtgactaaaaatatacatacacagataacaacaagacaaagagtgttacagttgtaaaactattctgaaattttctttacattttaggtaatagttttatattaaaaagaaacccccataaaaccaaataccctcctgaatgctagtaaggatttactacacaggggaaacctcaaaaaggctaaacaaatatggtatgacaaagaacaagaaaaatcaaaagaatttaagattcaggttggtattaactaacagatgtataacttcaggcatgttataggtattctagatttcagaagttctggtttagatgaaaaagtttcctttcaatagaaaaatgctgtttaaaaatgctgtttgtttttatttcggcattaaattatggcagtgatttgatttatatatggtatatataatttatatggtatatttgatttatatatggtatatataatttatatggtagtgccttcacgtgttctagaaggtactacgtttaagtaacgggttgactgactctccatttgattaagtttttctggtagggattatgagatttaactgcaagaacacttgtcaagataaaatgttgccattctctaacaaagtctcatttcaaaacatttatctttcttatacaaagtctaaagaagaatatgtcaagtaaaatcaccagtaatgtcacgatccatatagctaactactactgctataacagcctgtcttgtttctcatgtctgcaggtgtatatatttaaatgctattcagctttaacatgaatgttattgattttcttatagaaacctgaatcttcctggagtaattcagcccccaaatcaaaattgaagtcaacaggcaacacattattaacatggaaatgttgtcaagaacatagaggtatacagaggtcaagagcataaacatcagaaagggactgtggctggcctgcattcccagccacaaaaaagaaagcactggatactcaggaaggatctacttaagatcttgggaaattctgtaatcaagctagtatccaacagcaggcatttggacatgtcctgcaacccatcatcaatgcaaagagcttaaaatattaatcccaatcacagtgttccatttggaaaaagaaaaacataacacacaaacacatgtaatttcacctagctccttaaatgcaggcactctcccttgagaaaaaatgaacatttcctatcctgcagtctaaaaggctgcaaatgcagaggataaacattaacaaacacttaagaaatattaaatccgcatactaatttcagcttattactactgcagtggtttacatcattagtgtttttagaaaactaaagcatgactgagatatctgctatccaataggcaactgcaaaaaggatgaaagaacttaagactctcctacctagaaaataaggattatcactgaagcttccatttgaattttatttgatgttgagatgaactcagggtttatgcatcccacagccagaaagaaagagtagaaaagctaaagtggtagacagagtgcctctgtaatcccctcctctccaaagcagggccctaggggattatcttttggagtaatcttacagttaaaggtagcaaggagggttgctgaattgctccccccacccctccccccgccccgattgaaagggccaggtgtacagcataaaattactaacatagcaatgagattcaaatttgttattcacataaagcaggcatctcattcattactccactctgggccagatcaagtaagcgtgacaaagaggccttgaatgaaaagctaaaactaaatagtttttacgggggtcgttttttctagggtctaagaaccaatgtctactagatttgtttcaccaaaaagtagagagggttaaggggtaaaaacagagagccacacacttaaaagcacacaataaaattaaactctacctgcaaatatgtatttttactttattcaattaatgccatgtcacacctgcttgcaatgtcattttttaaatgtatcacattcgtttggctagaaaagtcaacagttcagttttggttagttattccctttctgacaaacattaaaatggaaagaaaatgctaactgggtgacaggaatttaacttattcctgggttaaaatagtttttgactttgtatgattgatttcatgtctcaagcccaccccacccccatttcaatgatactgagcatagtttcgcttaaattcaccaaaatattgctggcctataaatagtatactagccatttccattagctagcaccatggccataaaattgtactaaacaagaagtggaatgttctgaaaattccattttcactaagttattgcctaggctttaatttctgcctatgtggggctatgtgcctcactttccggcttctgcaggttgaggataaaagaaaatctataaaattacattataacaattttgaactcatttttttaaagttttgattagcataatgctgttactaatccaatggttcctaagcctaagatttatgtttaccaacacttgaaaataactatctagaatttaaagaaatatagcaaatgcaaaaatgcatcttaaattcttattgttcaacttatttatccatagcccaatttattataaaagacctaacttgtcagtgttttctaacactgtgggtcaaatatttcttggccaatatctgtccctttaccttctatcccaaaacccttgtcaggccaatgaactactcactgtccctagagactgcaaaacttcaaagaaaggaagagtattcctacttacaccaatggaatgaagatgtatcttggactgtgtaaaaagaaacagcaatagcttacatttttagcatgcctttcttctgagaaagcattagctcttcacttaatagtacacttgtttttctcatcacttctgtaaagtaggatgagcaaggaaagggtaaaggagcaggatcattttacaaacagaaactaacacacaaataatgtgttacttgttaattgccatagaagcaatgtttttcgctaaacaaaaccctccttaacgtcaaatctagtattttaaaaaatatttatccaagaaggagattttaaaaaatatatacatgtgtctgctcatcggtgcaaaaaaatacaggaaagataagccaaaacgtactgaaattgctaacctacaggacgttgagtgagaaaaggatataaagaagaatgtatagcttttttagaaccacagtaatgtttcccatacaaaaataaaaattaacaatgcggggtggggaaaacagggaaggctagaattgaatactgtagtaacaaatgaacctaactgtattacaaaacaacataaccatactgaaagatttggtggaaggaaataactaacctacgtaacttcagaaaactgtattttgactgcataacagttaacatactgtacaaaaatattgtactctagttagcaaatgtgtttttcacaggggtactagatgacaactgtgagactatacgggtactaggattaaacgagtatcaataaggaagggggaaggctgctgtgttgaactggtatgaacttacggttttttatatatatatacaggttaagtagatacagaaatatagatgtgtgtgtatgcacctgtgagcatagatacatatgtttccttgctttgccttttgagacatcctagaagcagtgacacttacgaagtaacaatgagcacaactagtactcagattttagttcctaataaaaggaacctgagctgaagtaggcaaaatacaagaggaacctggaacatctagtattagaaagtatttcaaaatataagcggtacatgctaaaaggacacaggagccaatctgaaagagcgcccaatacccaaagttgagataactggagcaactgtataaacagtaataggttataatccattaaataaaataaatatccatgggaccatcctgatattcacaactgagtcaatgaatgagtaaataaatgaggggggaagacacctcttcctaacagaattccatttaatgcaggtaggaagtagaacaaccaccctttagtaaacaacacagcaataattgctgtaggaaaaagtcatcagtgaacaataaaattatgagtaaaaatataatgagcaacagaatatttacatagtgtctccctataagacagtcatttattccagccagggcaaaatggcaaaaccttgtcactacaaaaaacataaaaatgtgccaggcatggtggcacatgcctgtgatcccagctacttgggaggctgagagatgggaggatagctgagccagggaggtgaaggctggagtggtgattgcgacactgcactccagcctgggtgacaaagtgagaccctatctctaaataaataaataaataaataaataaataaataaataaataaatattgtcagttattacaaagggaaaaatgctaattttacagaggagaaagctgtcaggcaccaccttaaccaagggaacaaacctatcatcactattagaaagacaagtcaaaatcatgaaccccctgtggtgtagagaagggtacagtatcttctgtggcattcctgtaaaacaatgcgtaacctctaataatgagaaaacaccaatttgtggaacgctatacaaaataactgaccagaaatcttgtatccaagtaatgaaatacaaaaactgagaactctcacatattgaaggacatttagagatgcaaaaactaaaagcaatgatagattctggacaacagaaaggacattaataagaaaactaataatacagaaattcaaataaagtatgtctattactttgtataagttcaatgttaatttcaatgttaatttcgtggttctgataattaacgattattgtgacaagatgtgttaagattagagaaagctccgtacggagactctgtactactatttcaacacacacacactctctctttctttctgacacaatctcgctgttgaccaggctggaatgcagtggcacaatcttggctcattgcaacctctgcctcctgggttcaagtgattcttgtgcctcagcctcccgagtagctgggattacaggcgcacaccaccacacctggctaatttttgtatttttagtagagacggggtttcaccatgttggccaggctggtctcaaatttctgtcctcaggtgatctgcccacctctgcctcccaaagtgctgggattttaggtcaccgtgcccagcctaaaatcatattttaaaagaatgaagaaaaaatgtatctagcattaataaaacaaacttcattcatacataaatctgtacagtctacaggttcctatcagttacagtactcacttaagataaatatagaatccattctgaattggccaaaatatccaacactccatcacagaaaagtatttgcagttacctgataatgccaggctctttcaagcctatgctgcattacacattactccctacaccatgcttcagcaagtccataagactcagaaaaaagtccatccttccctaggaaactacctttactgactccctccagcactcccattttatgcttgttggaagaacaagaagcactcaagaaaagatagatacctggttctacttagtctttcagacacaaagtgcagtctggaacaatgacaattagcttttactaactttcattatctatcaaacattgttaaaagcaaattataaattttaaattaactttgtaagaaggctagaaatcaggtagtaggaggagagtgtgactcctccaatttggttcttgtttttaaaaattgttttggctactggccaggtgcagtggctcacgcctgtaatcccagcactttgggaggccgaggcaggcggatcacttgaggtcaggagttcaagactagcctggccaacatggtgaaacccccgtctccactaaaaatacaaaaactagctgggtgtggtggcacacgcctgtaatcccagctactcgggaggctgaggcagaagaatcacttgaacccaggaggtggaggttgcagtgagcccagatcacaccacagaactccagcccgagtgacagggagagacttcatctcaaaaaaaaaaaaaaaaaaaattgttttggctcttgaaaatacttaacatttccatacatacttgaaaatcaatgttcaattgttaccaaaaacaacacaacataaaccaaaaaatcttgctgggatttttcactgggtttgcattgaatcattgtgtctaacattgactcttctaacacataaatacagcatacatctccgttcacttatgtaatctttttcagaagttttatggtttcagcaataaagtcattaacgtcttttgttagatttattcctaagtattttatgtttcttgatactaccgcaaatggaactgtttctccgggttatttttcagttgtttgctctaataaataaaaatagaattgacttttatatattgaccccgtacctggagaccttggctaaatctctaattctcacaggtttagggaattccatggggtttctaagtatcatatcttcaaatacaagcagttttgccctaccttttccaatttccatgcctttaattgcttttttcttgcaatattgcattagccaagacagagtacaatgtttttgtttgtttgaggcagggtctcaccccgtcgcccaggctcaagtacagtagcatgatctcagctcagtgcaacctccaccacctgggctcaagcaattctcccacctcagcttccagagtagtgaggactacaggtgcacgcccccacaccaggctcatttttgtatttttttgtagagatggggtttcgtcaggttgctggagctggtcttgaactctgaggctcaagcgacccgcccaccttggcctcccagagtgctgggattacaggcatgagccactgtgcccagcttacaatatttttaggatatatttttttcctaattgtagaccaacaaaacaagcactttcaccaagtagtgtgatgttaggcgttaggtttttttcctaatttttaaacagcatcacagctcaggaataaggtcttcacctttgattttcacgatttttactacaatgttgtgattctcatggttattattcttgaagtttcatgatttttttattttatttttgagacggagtctcactctgttgcccaggctgcagtgcagtgccatgatctcggctcactgcaacctctgtctcctgagttcaagcgattctcctgcttcagcctcccgagtagctgggattacaggtgtctgccaccacgcttggataatttttgtatttttagtagagatagggtttcaccatgttggccagactggtctcaaacttctgacctcaggtgatccacccacctcggcctcccaaagtactgggattacaggcatgagccaccgtgctcggcctaaagtttcatacatttgtaaactgactgtttaaattcaaaaatccagtcattaagttcctcaatttttttccatctttttttttctttttcctcatgactaagaatcatattctcatgtttattcatatgtatggtaattttctattatatacagacaatgtatgcaatacattatagagactctgaatttagttagcttttcctaaagagtgttgatttttgttctagcaggcatactactactacctggttaccttcattttgtggagctagttttgtttttataaaagcatagtggagtctattttggttccctccttaatcctatggtgaatgccttcgtcctgggaaacattctttaactctttaagtgtgagcctttattggtttcaatcaaagccctcaggtttttgccaagtctagttggaattcgaactccaaattctgccttccctgcattaggcaatgatgatcttctctgctcagctctttcagccttccaattactgctttccactatgccctataaaatcttccctaaacatgtgcaggtcaggggtgagcacaaagatctgaaaggggctcaaatagattgtgggcctatgcccctccccatctcccatagctccctctttgccactattcccctccttcaatttctacctacttggcagccctgaactccatcctctgataatatacaaacaagcccatgaagcagtgactattgaattctagaagctctggggcacatggactgagaatgctctcatctcttcctggcaatactttctgtctgaaattttgctgacattgttgagtaatttacctagtaatatgcacaggttccaagcttgcccttctttgctcattactttttcttaagcaggggaaagcaagcttctatttgaagagagagaatgagaaggtggggaagataagaggcatgtttcaatacactagagaacaactctcaaccgctttttacatgctctctttccaagggcacaccctctttgttcaaaaggagtcttaaatttcacagaagcatttatctgtacacacgacttatcggcagctaccaagctagaggcccgttaagttttctctccctcagctagccttacacctttaaaactgcctttgagtcagaagtcagaatgaagaggttaaaataaaaaaagaggcatttttctaggcattcctccttaggtcttccctttctctaacccactactctgtggtataaaaacagtacccacttccctaacccagaaaatattccttgatttgctccatgactcaaaaaaggttcacccatgaattcagtctccagttcttttgctcataggttgggtccttttagaacaacttagttcaataatatctgtactgtattcaagacccaagcagatatatactggttctgtcaataaacaatcatcctgtttggaaataaagcaaaaagactatgtatccttgcagtgtaccactgggacattacctaacaagcccacccaggaaacatctgactctccataaattatttaactttgttttacctactatctataattgattagggcccagaagtcttactggatgtttattttagaacgctgacaagttaaagttggtttgcatcttgttgaaaacaatgtccaaagttacagctttattgttctataggatattaataacttttgtatgctactgagtaatcatattcctgcattcttcctttttatctggtattaaaatactgttaacagtttggccaccatcatgattcccttgttattcagtaaatcactatatatttaggaattatgtctaggctggtgcagtggttcacacctgtaatcccagcagttttggaggccaaggccagcggattgcttgtgctgaggagtttgagaccagcctgggcaacttggtaaaaccccatctctacaaacaatacaaaaattagccagacatggtggcacatgcctgtagtcccagctacttgggaagctgaggtgggaggatcacttgaacctgagaggtagaggctgcagtgagccaaggtcgcaccactgcactccagcctgggtgacagaataagaccctgtctaaaaagatggaaagaaagagagaaaaagaagagagaggggagagagagacagagagagagagaaagaaaaagaaaagaattatatctaatgttttgaaactatattttgacaattctaaagacgctgatttttttgttaattccagctgagtttcagaaatgagaataaaaaaattaaacataacagaaaatacctctgacattattatttttaaactacaagtcttcaaatatatttttgggtaataaacaagcacagtccaggagtttgaggctgaagtgagctatgattgtgcgattacactccagcctgggtgacagagcaagagcctgtcttaaaaaaaaaaaaaaaaaaaaaaaaggaataaatacacctacctccatttggggaaaaaattaacaaaatggaaaacaggctggttacatgtgggtatgaaaacctacagttgccctctgtcccgggcaacctaatttttttttttaagcaaaactgagaaaagtcactttcctaaaatttaaaacaaaacaaaacaaaaaaacctggggaacaaacaagcaaagttaaatactgccttcttatacagaaaaactttgcctggcaattgacatacgcacagctttgcaaatatttggcattttaaaaatttaagtcaatagcttttaagaaacatatgctctgcgcccattctactaataataaacaatggaaatgtattgtccctgctccccccaccccaccccccaacccctgtcttctcttaatactttctgaacgcttttcagaaagcatggatatattcataaagggtagataattcacgaaaacagggaaggggtaatctctccttgacaaaatagtgacagtgtatacttagttgttttcattatttattttactcaatccaaaaagcattctattgcacaatgttgaaactagtatggccaacacaaagggaaagatggtcttgaccttcaagaatcttacaatttaatacacacacaggaatcttacaatttaacacacaagtaaatgaatgaagggtagggaaaggaccaagctcctaaagagtgtgtgtgtacaagtgaatctgtataaactgtctcacaatcactgtggattttttaagacaatgaggattagtaacacaatggaggactgttatgccctgtccttcagaagtgctgaggtaagagaaaacatgactacagggagattactcaaaaaagtttggaatccctaaattctatatacaaatatataagtatctacatagaacttactcccctatcacatatgcctcatgtttcatgtttcctgtacccataccaccaatgtatctatgtttcctttctcacttaacaatttttaccctgattagaccattcactaaaagtttcattaataacttaaaaaagatctgtaaacagcatgcaatgaacttatattatagacttaaatagtggcaaaacttggcattctgctctttaatttattcaaaactactttccagttaagaactatcaatcttctagtgtcttcacatttatctctagcaacagtggctggctttcaaaattaggtgagagatctttccaagatctaaacatctccaatatctgcctcagagaaaatttagtttccaccacatcatgcgttcctgctaacaatgattaaaataaataaaagaactataaggttggtttatttgcggatacaagaacagcttgcttaactcaccatttaaaaagccatcacttcacactagctttattatctgaagcataatcaaaataataaactacggttgtgggactttggaatttctaattaagttatggagacttaaatcaagaaatatgaatattcataaaacccagtaaccttttaggcaaagtaaaaaagtgaaaagaacaagtgctcttggaattcagaaagaaaattaactatggtattgagagaaaccaggaaagagaaggaatcacagtagagctaggatacagaaggaaacagaaaatgacagtttaatgctcattatagaataacagtgaatcacccacagagaccattttcagtgttcttgtgaatttaacctctagtctaaccttttaatgaaaaggctataatatattagagtggcccagaaaggtgaccttatgtctcaggtgtcagagccacacccaggtctcctgattcccaatgatactccctaaagccttacttgctctggctgtagtgttttgagaattggagctgcttttaatcctatggtcagctacacagctgcaggatgggccctagattccctattcaggaattcagatcttaaaacaccaaaagtgataaaagtagatacagttccccttcttcagccaatgcaaggatcctagttacagagaaaaaacggtgtgccaagacaacacccttaattctcacgcatttccccctttctatcttttatacttaccaatttatcagtcccatgatctgtcttcacctcagaactaagtggaagaaataagtctgttgtatgctctgggggaggtacctccccaagaactatcaacccctgcaggatagagaggagaaaaatagcataagtgagcagtataaacttcaaatttaatttaggagttaagtctcaaaaggactgttggtgtactagaggccccctcttcctcaccctatggttcagaaacaaactacagcagcagcagctttgttttcccaaagagctatttcaacaagcagcagacccaggctcccctctctgccacttgactgctctgacctacatggctcatcagccatttagcatctttattcatatctttcagatatgaaatctttaccagattatggcatttataccatattactagactccactagattaacagcagcaatgcagtttttgtagccaacaaatgcagtttatgacttactaagctgaaaatgctactattcttaatcatgtactccaccaactatacctgcacaaacaaaactgaatgaaacaaatgtggaacagtcccctacaatttatgagaaaccaagagcttcttaaaagctggcccaaaggaacctgcttttttcataagcataaatattacttcagattaagttcctgcttgacaatttcaaattcagacctttggaaattcattccaggaaacaatttacataaaaagaaattaaaaatgaacccacaagtcctccccattgtacatataatgagccaggatgggtaaaggcagaaggtatcttattattaaaaaaacaaaatactacatatgaatcccaccatgtataccagaagaggtgacaaaaataaggctatgacactatataaccgaaagactgggatgcaagtgatcagggttcccaatctctttctctggtctaaaaaatagagatctaactagattaagaagctcttaatggaaatttattatcagaatcacctggggaaccttatcaaactatactggcttaggtccaacatctactcagtacctctgggggtggggccaggtagtctacctttttatgggggaagggaggcaggacatggtgggtacatggaggtgggtgtctctctcctcccccaccccgccaaccccactatgttaccgaggctgatctcaaactcctgggctccagcaatcctcccacctcagcctctggagtagctgggatgacaggtgcctaccaccatgcccagaggtggatattctactattctttaaaagctcccctggtaagtcctaaacttgtaaagttgaaaaacactagacttgattagtttgggctcaaagaacatcctaaagtatagatttgggggactagggattgtgactattagtcttagctctctaggccatacgacagactcttatgagccactaaaccagatgatccatccctggggtccttgtaactaaaaaaccaatatgaaatacaagctgcagaaaaggggaaaacattaagaaagaaaaatggaattttatttcagtttttaaaaaagaagtatgtatctctttttctcttgaagcaaaagaagcactgcctccctattctggaatatgactacacttagcccgtatcaaaaatgaattggagggtcccggaatggcggctcacacctgtaatcccagcactttgggaagctgaggcgggtggatcacctgaggtcgtcaggagttcaagatcagcctggccaacatggtgaaaccccatctttactaaaaatacaaaaattgcccaggcgtcgtggcacatgcccatagtcccagctactcggaaggctgaagaaggagaatcgcttgaactcaggaggcagaggttgcaatgagccaagatcacaccattgcacaccagcctgggcgacagaccaaggctctatctccaacaacaacaacaacaacaacaaaaatgaattggaggctgggtgtggtagatcacacctgtaatcctagcacttggggaggttgaggttaggagtgcgagaccagcctggccgacacagtgaaacaacgtctccagtaaaaatacaaaaaatagctgggcgtggtggtgagcccctgtaatcccagctacttgggaggctgaggcaggagaatcgcttgaacctgggaggtgtaggttgcagtgagccaagactgtgccattgcactccagtctgggcaacgagagcgaaactccacctcaaaattttaaaaattaaaaaaaaaaaaaaaaaaaaaaaaaaagaattggagtctcctcagaaacaagagaaaggccattaactagtaagcaagaaacattaaccctagcctttaaaatgaggtttctctggttaaagaacttctgcttcaaaatattttcttccctaaatcaaaagcataagatataccttacaaactttatcacatccaaataaaaactatttgcaaaagacagttatcttgtacaccactgccttctcaaaacgttgtattcaacagatattccctacttaagggcccaaactgtcttcctgcttcctgtacaaagcatgccaaaaatcattttattattcaaattttcccataaccggttcctaagaacttttttaaagatcaatttccaactactttccccaaatatttgttagtgttataccaatctcatcatctcctagacaaatgtttcaatgaatgtgaagctgttgctgctgctggaggtaagggttattagtcagtagaaggttaaaaaaaactgaattaaaggttaacacatgagctgttcatctttatttatactcatttttatattttatcagtccaaattgccgttcgtccttccaaagagattttcaacaagtcccacctccttccaagaaaatgtcccgggttaatgagttcctacttgctttatccacactgccagacctcctaaagcacggtgattgtatcttactttctgtgtatttaaatctcatttccagagcattcataatcttatgccacattatttatttcacttattattgcctcagtttcttgtttgttgagacagggtcaagctctgtcacctgtgctggagtgcagtggtgtggtcacgaatcactgtaacctccccctcccgggctcaagtgatcctcccacctcaaccccataaatagctgggataacaggtgcatgccaccacatccagctaatttttgtatttttttggtagagatggggtttcaccaagttgctcaggctggtctcgaactcttggactcaagtaatgcacttgcctcaaactcccaaagtgctgggataacaggtgcaagccaccacacccagctaattgttctattttttggtagagatggactttcaccatgttgccaaggctcgtctcaaactcctagactcaagcaatccacctgcctcggcctctcaaagtgctgggattacatgtgcaagccgctgcacccagcctttaattgttaactaatgttagtttattgaagatgtggacaaaatacaaatatatttaaatgacccatgtcccttagcagagtcatacaccaagaaaataaatgcatagcaaatatttgttgagttgtataatttttttcctaacaggaaaatattaactttataataattatagccagaagataaataaatctaacaattagatataaaattactccttcaatttttctttttcagttatatgaaagtaaggacgcagtcagtattttccaaagggaagaatttttccttaaactacagaataatttctaaatacaaccctcagatagattatgaagacatctcctaagagagtataataaaacttggtagggaccatctattcatcgacataattttatagacccacagaggatgtaggtcaaagcttatgtctctacaggccaatacatggcagaactggggcaaaagtctgcatctaactaatatttcattcctcttttgttcagttaattaaatcatttatccgctcatcagcatttgttaggtactaaggatacaagaaaaaatgagagacctatccctctcccctaacccatccttcaaagtgcttattacgttctaatactgcggcaaagaaaaacaatgtaaataggtaaatgttatgtactacattagaaggtattaaatgctagagagaacaaaatataggatagtgaggggattaagaagtggaaatggtggggttggtcgtgacggctcatgcctgtaattccagcactttgggaagccaatggaggaggactgcttgaggccaggagttcaggaccagcctgggcgacgtggcaaaaccctgtctccacaaaaacaataataataaaaattagcctggtgtaatatcacacctgtagttccagatattcaggaggatcacttaagcccaggagagagagagagatacaagtgggagggggtactacaggcgcataccaccacgcctggctagttttttgtatttttagtagagaaggggtttcaccatgttgccaaggctggttgcaaactcttggggccaagagatctacccgccctggcctcccaaagtgccgggttgcaggcatgagccactgtgcccctgcttgaatgtttatttgaagacagaatcaaccagctatgccaatgtgcttacaagataggagggaaaagagtcagagacactgccaaggtttctagcttccacaaccagaagaatggaactcttcttcatttgttcagaggacatttgaatacacattagttttaattaaacctatttttgaaaatatgtgctcaagtgttacactgaagcaaccaacaatcatccatacactgtccattgcccccaagatatgtaagttcactatggcattcaaaaccaaacactggatcctctaatttaatactgtacctcacaccaaaaaggatgaaaacagctaaaaagaggctgagcaaataaaaagcatccaagtaggtaagagtcattcatgcaggtagcatctattgagtggctaccacgtgcaaggtagtgtgaaaacacagtaataaaataaaaacagattctaccataaggagcttatgttcatctagccttgaacagacaaagagacaaagtattatgacagtactataacagaagttgagagaaggtgatgtcagagcagaaaagagcctaactgaagagactgatgaaagtgaggctttacagaggaggtctacataattacttaacattccccaaaatatatttaatatattttgagctatacttattcattaactatacacttaatgactttgcccttttctgtatacaatgtttcatatgccacaataacacttatttcggataaagtttactcatgtttaataaccatgaaaagaaaggttagcattagctgagaaaacttcataatgttctactccacacctgtcatgctaccccaacatgggcttccctaacattccaggtttaaactgggtcagtgttgaatagctgtgccattagcctggtggcaataaacttagggctgctgtactatgaaatagcaaccggtagaagccgaagaaaaaggtcaagagtctccttttccttcgccatgtcccgagtcagagccaggatcatgcttaggctgcacaggcctagaaaactccaagagtgaagcaagcttctgctttacacaaggaccaaaggaactggaatgggtcacagttacatgcagccttaatacctcctaagtgactcctctgtggatgaaccctctctcaactgtatttgcaatacagctaacaggcaatttcacatacttccttacatcactctatcaggtcaatcttccctatgcatctcaagacaaaccagtgaccccactgcagaccagttccacaagaatcaccctgggctacctggaaaagataagttgtctaaagtgctttaaaaaaccctattaagatgagaacttcaacagctttatgaaaattttgaagagaaaggtgttataagcttctgcagttcccattcaactccttccctattcaaaagtttcaatgctcttccacctcccatcctcaataacatttccatcctcagctacagctgtgtaatctcaaagagtagtcagaagaggagattttaaaaaacaacgtaagagtcaagccagtgcttctgggaggccaaggcaaggaggatcacttgaggtcaagagtttgagaccagcctggacaacacagcgagaccccatcctttaaaataaaaaaaaccctttaacaattagctaagcatggtgggacttgcctatggtcccagctacttgtacttgcaaggctaaggtaggaggatagcttgagcccaggagtttcaggttacaaagaactatgatctggccattgcacctcagcctgggcaacagagcaagaccctgcctcttaaaaactgcttagtccctattctttcccctcatttaccaggtgtgaaatttcaacaaacatgtttcagtgaaatgatgaaaaggacacaacagcaaagtatgttagaaaaaaaatgctttggaatcagataaaaagtcctgagtttaaatttagctctgccttttacaagcctctgaagatttattctgatcattaaacgaacatacatgagtaaacctttaattagtatacactcaaggtacgtatattgttttcgtttctccttctaaagcatggaagagtttctttttaaaaaacaagctgacaaactatgaaaattaaaagagtacaacagcatgcagaagtagtacagaggagttcctagaagttatattctttctccagagagcaatattattcccaaaagggactctactcacttcacagcttggaaggtaatacctaccttctgacagaacagaaactggtgtctggatcctagaatcacctagcagtagtcacaaatactttttttttttttggtaatacgccacttaaataaaattaatgttaataagcaacaaagtaaatccttaaaaagaaaagccccaccatccctccaatctcccacccgaagacaaattataactcaacagcctatcaccaagattcagcctatcacctaggttcatctcaaaaaaaaaaaaaagacctgtgcaacccaggaagtgctgggaaatcttggtgcagcatggaaaatatgaacaccaacccacttaaccaaaacacataggaaaaactttcttccatttcagtaactaaaaaaaaaacccaagcacttaaagtgattactaacttgagcaatagctctgcactcacttggatgtgtaaccatgaacaaactacttgactgctctgatcttccattgtttatcttgaaaatcgtgaatgagagtaaaatgcttagcacagtgcctgacatatcacaagtgctcaaaaacttctattaattatagtgttacataaagactaaatgcatgtgaatatatcattgggggaaaattccatggcttgttagagcaagttgaatattgtctcttccaaatttatgttcacccagaacctgtgaatatgaccttgtttagaaaaagggtctttgcagatgtaatcaagttatgaagagccatttagtgtgggctctaaattcaatatgactggtgtcctcctgacatggaaatctacacagatgcaaagagaaagatggtcatatgaagatggaggcagcaactgcagtgatgtagctacaggccaagaacaccaaggactagcacaatatcagaagctggaaaaagacaaggaaggattcttccctagagcctccatagagaccatggcccttttgacaccataatttcagacttctggcctccagaacggtgagagaacacatttctgattttttaagccatcccatttgtgatagtttgttatgacagtctaggaaactaatccatttgttgaaaaagaaatgtataaatacgacacgtaaagctgtgaattttcttgatgcattacttattggaactatcaacctagttttattcttcctatcggaactctgagaagtaaaagattatctatgatgttgtattttacagaccaagaatctgaagctcagaaatgttaagtgacttttcttctcaaggttcatgtaagcagctggtagcaaagccacgattagaaacaaaaatttaccaagtccaagtatggtgcttaatacaatacgctttgaatgatgaaactcttggataagcaacatacattcatgtgccaaatagcattatggtcaatgacagaccacatatacaatgatggtcttataagattttaatacagctgaagaatacctgttttagcacaaagcactactcctgtgtttgtggtgatgctggtgtaaagaaacctacagtgctgctattagaagtataccacatacaattatgtacactaagaatataatagctgataataaaagctatgttactgttacacttatttcttatgataataaaaagtgttatgtatttactatactatacttttaatcgttattttagagagtacttctactcattaaaagaagtgaactgtgaaacagcctccagcaggtccttctgttggcactgtcacaggcaatgaaagctccgtgtgtgttgttggccctgaaaacctaacagtgtaacaagatgtgaaggtggaagacagtaataccgacaaacctgaccccatgtgggcctacgttcatgtgtgtgtttgtgtcttagtttttagcaaaacagtttaaaaaataaaactttcattttaaaatggaaagttttaaagatagaaaaaagcttgtagaataaggtgtgaagaaaatatttttgtacaattacaatgtatttgtgttttaggctaagtgttattacaaaagagtcaaaaagttttaaaaacttaaaagtttataaagcaaaaagttatagtaagctaaggttaatttattattgaaaaaaatatttaaaataaatgtagtgtagcctcggtgtacagtatttataaagtttatagtagtgtacagtcatgtcccaggcttttcaatttcagttacccttcacccaccgactcacccagagcaacttccagtcctgcaagctccattcatggtaagtgccctatacaggtgtaccatttttatcttttctactacatttttactgtattttttctatgtttaggtatgtttaaatacataaatctttaccactaattgcctacagtattcagtatagtagcatgatgtactggtttataccctaggagcaataggctatataccatattgtctaagtgaatagcaggccataccacctcagcttgtatgtattaagtatgtatatatgtaagtatgtatgtatgtatgtatatgagacagagactcgctctgctttgcccaggctggagtgcagtgtcgcgatctcagctcactgcaccctgtctcccaggttcaagtgattctcctgtctcagcctcccgagtagctgggattacaggcacccgccaccacacctggctaatttttttgtatttttcatagagacaggggtttcaccatgttggccaggctagtctcgaactcctcacctcaggtgacccacccaccttggactcccatgcctcggcctcccaaagtgctgagattacaggcgtgagccactgcgcacggccctcagcttgaatttaagtgcactttatgatgttcacgcaccaatgaaatcacctaacaacacatttctcagtttcccttttgttaagcaatgtgtgatggtatatacaaaactccagattattttccagatatttagaaatacttttcagatattttgatattttgaaagtttctgaaaattgctctgtcattacttctgagtgatgagctgaagaataaagcatgaaccaaatgaggtgagtatcttcttatacacagctagtgagactataaactgacactgccaaaatacttctctgaagaatgcattaagaacataaaagagcattcatacctttgactgagataaagatatttatcatggcatatttaatttaaataacaaatgtaacttaaatagtcaacaaagaaagccaatagcatgcagccattaaaaatgttttccaaaaaccaactgggaaatattcagggcacatacgtaacatgactgtatttgaacaaattacttatgtgctaggaaaatgtaccataatgttggtagcgagataattttgagctgttgggttgtttttttttttttggggggggggggggagggtgggtgtcttttatacttctatgtcatttcagtttcctgagaattgatacacagtatttcatcaattctaagaggtactctccccacatgtcaacaacttttaaatcaagatgcattttacaatttctgttatgccctggtttaactgaaataatttctttgtcgtacttaaaacaatggtacatcttacaatcaatagcatcttaagttctatgaaatgtagcagttttataacaaggaactaagatgatataacatatacacatatataaacccacatatatatttatgaatgtatataaaaagatgaagcagcacttatgactactattatactaatctcagttgttactaagagactctagttctcaaatatagaaaatcccacttaactactggctataaaaacctagaaacagacactgaagaggtgtctctgatagagaaagactgtgtttttctcctcagtacaggcatatccagtcacctcctagttattcttagtcatcattccagttcaagttctacaaatctcactttaaaatttcctttgtgaagacttgggaaagcaaaatatgcaccaaatctagaatgtttattagttttgttccagctaatttttaaataagtaaatcaggatttaatttgtatgctaccctaagggaacaaactagtaagaataaaaaagtgagccctctggactgtgtcctcaattaaagtatgctctattgaacttttagggggagggggaatatatatatatatatgtatctccaatctggaaagaagctataagtccgcagtgacatttttagaataaaagtttaaatgattagatagcccacagaactttcacttcaaaccctgatcattctgttcattttatcagttgatcaaccttcaacttttggcctactaatttaatggatactgttcacaggaaagccattttcttaaggctttgactagtactaaggtcaaaaaggcattttgacccttatttttagtagcaatagactttttctagacatgggtctacataaagatagagctcagccacaccaagctaatataaaaaatactttgcaagaatgtaagcttcatgaaggtaggatttttgagaacactgctgagacacagtaagcacttaaaataatggtacatcttaccatcagtagcatcttaagttctatgaaatgtggcagttttataacagggaactaacaaatataaatctaacaaatatgacagttaacatcaatggcttgcttgcattattcagtctgttttccttgtttcctgttagctcagatacccacacagttttgttctaaatacacgttcagttaaacattatattctaatagtgttttcctttttatgagacaggcctttcttagttgtccaggctggagtgtggtggcacaatcttggctcactgcaacctccacttcgtgggctcaagcgatactcccacttcagcctcctaagtagctgggactacaggcacatgctatcatgctcaactaatttttgtaatttttgtaaagacaaggtctcactatgttgcccaggctggtctcgaactcctgagctcaaatgatcctcctgccttggcctcccaaagtgctgggatcacaagagtgagccaccacgcgcagccacatcaggttcttaaattaaaccactatatcaggtcattaaaccatttactttgcaatagttaagaagagggttatgggggttacgaggtgggaggggatgtgagaaaagcgatattgatagttttcggcagcatttaaaaacatcagatacttatcccttaccttattagcacgtatctgtttgtaaatgtctgtttgctgacgaattcgatattccaagtcagaaacatgagcctgaagccagttccagcggctgacaatagctgcccggtctgcagcccatttccattctgacctgcgtctcctaaaaggaaataaactgagtgaaatccaagagtagcagtaatatctataccagattggggggtggggagtggaatttaacttttaaaggcccttgcagagactaactctagtgtcaagaaaaacccaagagagagacaagacacctcccgctcatcaggatgcacatggatataaacttccaaataggtatttcccaaattaagtggaactgcgttctagcatcctgatcctgtggcacacagtttctctgaaatccctttaatttctctgggacaataaaattattgtccatgccaaaataaaacatacattaagaataatctatacaggaaatccaactgacactaagaattattaaaactaataaagaattcagcaaaagtgttcagtaaagaatatttaaaaactaataaagtagaaaatatcattaagtaccattcataacaccaacaaaactaatgatatattaaatatctttacagagaaaataacgcctgaaagcatgaagatctatacaaatggtaggacacatttttttaggatggcgattctcatgaacatctataaattcaaagaaattccaatcaaattgcctacagtatttttaatgaaagctgagaaacagatctaaaagttcacatggaataaaggaccaacagcaagaaatttgcaagaaggcatgatgcaaatacacattaccagacagccagatttgctgcaaaactatagagagcctcaaaacgtagaactagatacataaaagataacgggaaatttttaaaaaatcagatcagtgcagaaacgatcaaactactcaataaatagtactaaactggccagttctttaaaggaaaaagtaaaattagttcccttcttcatgatataattacaaaattttggcatttcaaattgctaaatatgaacagccaaacttaaaagaatatcttcgggacttagagcagggagcatttcttagataatacacaaagatttcacctacttttcaacatacaatagaaaatctaataaagttaaaaggccaactacattttggtggaagatatctaacacatataactgacgattaaacatcagaatatgtaacagaactctcagaaataggataaaagaaaaaaagacaatcttaacagaaataggaaattcacataaaaggcaaataataaatatataaaaatgtgtcatctcgttaaaatttggttaaaatataaatattaggtaaaacattaagatgctgtttgaaatctggatgggaaaacgcacagtctcataaagccaacaggtggtgagaaatggaaaagagcaattaatatattgctggtaacagttaaaattggaaccaccatttttgaaaaataatttgaaaatacttagcgaggtgtaaaatgtgcatacccaaccatcatgatactgtattttttttttttttttcctgagaggcagggtctcacactctatcattgaggctggattgtggtggtgcaatcacagctcactgtaacctagagttcctttgcttaagctatcctcccacctcagtctcccaagcagctaggatcaggagcatactacatacctggcttttttttctttttttttttttttttttttgagatggagtttctttcactctggttgcccaggctggagtgcaatggcgcaatcttggctcaccaccaaccttcgcctcccaggttcaagcgattctcctgcctcagcctcccgagcagctgggattacaggcatgcgccaccatgcccggctaattttgtatttttagtagacacggggtttctccatgttggtcaggctggtctcaaactcccaacctcaggggatccgcccacctcgacctcccaaagtgctgggattacaggcacgagccactgcacccagccctgactaacttttttttgagacggagtcttgctctgtcgcccgggctggagtccagtggcatgatctcggctcactgcaagctccgcctcccgggtttacgccattctcctgcctcagcctccggagtaactgggactacaggcgcccaccaccacgcctggctaatttttgtatttttagtagagacggggtttcactgtgttagccaggatggtctcgatctcctgacctcatgatccacccacctcagcctcccaaagtgctgggattacaggcgtgagccactgagcctagccccactggctaatttttaataaaaaatgttgtggagatggggtcttgctatggtgtccaggttgttctctaactcctgacctttagcctcccaaagacacgagccactatgcccagccatgaaattctgtttctgagaacataaactacacattcctctgcataaggaaacaggttcactggaggagagtctgtaatagataaaaactaattatattctaattctgctgaacttggtaaataaactataatttattcatttaatagttctatagtaataaaaataaacgacatctgtatgtatcaacatgattaaatctaagaacacaatgttgaatgaaacaactacaaaaaaactaaacaagattaagtacacacaagtagtgaaggaatttgatgaaatactatctagcaatttatttactgtatgtatcaacatgacctaatctcaacaatggggaatgcaaaagctgcacaaaaataaacaaataaacattaataaggattgttaccaatacagataactgatgaatatattttaaaatgcctaaaactgacatacaacaaatttacaatcaagctcctcattatctctggaaaggggatggagaagttggattttagctctacctataatgtttgacttctcatgtaaaaaaacaaagatggaaatgtgacaacattaacattgtttaaatattacactggggatacatggtgtctactatattctgtaatctaaatatttcataatctaccacaaaactattttcccagaaagcagcagcagtcacacagccctcagccccacttcccatcaggatacacacactcactgctaaaacttatgactataggtgaacttgaacacagtctcccataggggcaaaatacaaaatgtcaaaaataaaaaagaacaaatctgaccacgacagagtaagacatgaattaatacttaatcataccataataattaagaccaagggtagtaatggtattttaacttttgtatggaccaaacataaaccattcaaaccaaccactgtgataattatcaattatgtctcttcttttagaaagaaaacattttacagttccctaattttgatggaaccacttcaagataaaaagatacttttaaagtacagttatctgcttcaatgttggctgcaggtctagctctaccctaaatccaggaaatgatctcaagagatcaataagaaactagggatcattcttgaacaacaaaaatgccccctacccacaaagagacaaaactagttaaccctcgtattttattcccacctttccttacttttcaaggcttaccacctttctatcctgcaaaatcttttggatttatagattcctttcattcctaaaactaccaccacaccaggtccccatctatcaccactgggcaaccccaacagcctccttagctgctcttcccaacaccagtcaatcatactacttttcctcaatcaactcccctcacacctttttcatcctggcattctaatgtttaaggaaccatgcagctcctttgaaaatacaaaaggaaaagaaaattacttaaaacattttagttcgcaagaactttgataaatacactttttcttggatattaatgaaggtcttatgtcccctacacaggtatttacctaaataacaatacaaagcgagcctcctgataatatgttttggataatatggttaataaactaattaaagaaaggcaagacagcactaaggaatactaacaattcccaatttatgaacaagtttcattttacaagtgtatctgtgatgtgatggtttagaactcgaagtgatttccaggagaaagttgttacaacattattcttccataatgctgctcaaactctcatcatctccaatgaaaaatggaaaaccacaactcaagcgtccaagaagtatcttgtgttcaaaataccagcaatatgagcagaaagctaaactgttattaagcatgagaggtgtacagttaacaagtctggataagatatgaagatgttaccatactccagtggcagagcagagcaccactaaacagtaacacaagaataagagcttcacatcttttgttccttaacaaatacaagcggccgggcgcggtggctcacgcttgtaatcccagcactttgggaggccgaggcaggcggatcacgaggtcaggagatcgagaccatcctggctaacacggtgaaaccccgtctctactaaaaatacaaaaaaattagccgggcgtgatggcgggcgcctgtagtcccagctactcgggaggctgaggcaggagaatggcgtgaacccggaaggcggagcttgcagtgagccgagattgcgccactgcactctcgcctgggccacagagcgagactccgtctcaaaaaaaaaaaaaacaaaacaaaaaaaaaacaaatacaagctatataaactcagcttatcagaggtaaagatagacttcctcctcaatattcgaagtgtaaatttatcactctgacaatttacagctcaaaacaagggacacacattgaacattagggacatgtttaatgttataccatacagacttcaggaaagaacacaggactaaggttgcagaataatactttaaatacaatgaggacttggtttctaatatagtcattatcaataatgaagaaaatcacgtggattctaacactgatgagtcaactcattcctgatgcttgtttctgtgctattagtgaaataactgttttaactatgtgcctgagtaggacactagaatgccttagaacgtttgattttaccgtgtgctttatcctagtccatacaaaaacatgtactatatatactgtagttatcacctgagtgggaattcttttcaactcgtattttgctcattgcttttataaactttttattggtaaaaatggctttgtcaccatgtgctatacaaaaattcattaaaatgttacatgatgaattactttttggttacctaaatgcagtatcaatatttgcttttgtgacaccacatgaatagtacaccttaatgttaaccagctatgtgctagtattggtttacataagaaatatttgttgtatataaatatttcattagctatgaacttgtactttaatcgttctttttacacagttagactattaccacagagaattgagaatgctctgttgactctaagaacatagatctttcctgtgtttgtttcacactgcttttgagctaggtagtgagtacctgtgaatggttttttgttgttttcttcatgtgactcaacaattttaagacttctcattggtgaaatctatggtgaaaccccatctctactaaaaataaaaaaaattatccagacgtagtcgcgcacgcctgtaatcccagctacataggaggctgaggcaggagaattgcttgaatccaggaggtgacggaggctgccgtgggcccagaccacacgccactgcccttcagcctgtacaacagagtgagactccctctccccaaaaaaaaaaaaaaaaagcgccctctataaacacacttaaaccatacagtaaaagtaattaatttttttccttgcaaattcagggttcagcttacatgttggctaaaaattaatttttgtttttagttctttaaagttattaatagtcaatgggtttaaaagggattatcaatagatcaactcttttgtatttattagataagtagcaccaaaagctagacattgaaccacatggaacaccacatgttgactaccaggcctagtgcctctaattaagtcacctaattctattctaagatgggaaatttgtatgtcaatccagtagaacagggctggtggattatgcttctcttccctgatgtattaacataaatttttttaaatctcattaaggcaacaaacatgccagaaaaacccgaatggtggtaatttcaactttgattctgatttcagtcccatctcgattctttccttttaatgaaacaaaggttctattagccaactaaagtaaaatgactgttcacagtgagctacacagtgctacattcacactggtagataaattgacaaaggattatgtgctacttccaagtgtgcaggaaatcctgagacatctaagttctgaaatctccaggttatttagataacttttaaaaaccaaaagattcaaataaaactgagatcatcccagagcgtacaattgccagattaacagttttcagggtaagagttagggtcactgtggggcaggaatgagaaatcttgaaattgctgagtcacatgaaaaaaacaaaaacaaaaaaccactcacaagtactcactacctagctcaaaagcagtgtgaaacagagggaagatcaggagacaagttctcacttttacttactttatgtgatcctaaacatataaattgacctctgcaaataagaacaacatctgcttcacaaagttgtgatagccatacaatgatgtaatcctaactgcaacctaaaatgtatgtattagataagaataacaatttagtcagctgggcacggtggctcaggcctgtaatcccagcactttgggaggccgaggcaggcagatcacaagataaggagtctgagatcagcctgactaacatagtgaaaccccgtctctactaaaaatacaaaaaaaaattagccgggcttagtagcacgcgcctgtaatcccagctactcaggaggctgaggcaggagaatcgcttgaacccgggaggcagaggttacagtgagtcgagatcgtgccactgctctccagcctgggggacagagcaagactctgtctacaaaaaaaaaaaaaaaaaaaaaaaaagaaataacaatttagtcattataaccatggatttaaattccgtatcaaaaaggtacaaaaaaggaagaaaaacagaataagattaaagaaaaacctctcagataaattcaggaaacaagtgttttcagttagcaacaagccatattctgagagtttcttgagctttgaactttagagtcatctaaaagttccactctaaacagaaaaatcaaagtagtctattagaatagacattgcattatcagtgacattaccaccaaatttaaaaagatggaggggataaagcacaaggagaaaaagaagagaaccaaactgtccagagttaaatatcccacattttagttgtaaagtaaaacccaggaaaaaactcggatacatacttcgtcttaacccattctcatctgtcacatgacctaggttgtgtcagctttctacagatatctgtagtaatgtggaacaaatgtaccagagccaatacttttttttttgagatggaatctcgctctgtcacccaggctggagtgcagaggcacgatctcagctcactgcaacctctgcctctcgggttcaagtgattttcctgcctcagcctcctgagtagctgggattacaggtgcctgtcaccatgcctggctaatttttgtgtttttagtagagatggggttttgccgtgttggccaggctggtctcgaactcctgacctcaaatgatccgtctgcctcagcctcccaaagtgctgcagttacaggtgtgagccacagcacccagccccagagccaattctacctaaactgccaattcatcctgacagacccttgaaattgaacacagcacttttgtcttactacttcaactagattacctctaatatttaaatgaaatttgtgtagttttggtagtttatttcagccaagcatttagcccaccatgaactcactctatccttcttccttccatttaacaaatatttaagcaactattagttaccaagaattagactaggttagggatgcaaaaacaagaactgtggctaaagtttacaatttaatggggcagatagatgttaataatcaaataatcatataaaatatacgataagagatcctaactatgtcagatttagactgggggatctagaaagacttgtgatataaatatttaaacagacctccaaagcataaaataggacttggatgcacaaactggtagggcttggggatgtggagcagaagacattaggtggaactgtggtgtgtcacaaagaaacgacatgtatacaatggttatgtggttagaactccaacagtgaacaacgaaaagaattcattcaacttgacaatggatacaggtaggcagggccaggtcacacagaacctggcaatccatgttaatcttataaaacaatataagcaatcctcatctttcctcatgctcttttatttatctcagaccctgtttgaatgaaaatttacaaatacaagctaaaagataataaactcccacaaaaccatcaaccaatttcaactatcaacttttggcgaatcctacctcatctataacatctatctcccatccctatgaattatttttaagccaattcccaacatcacatcatcacctctaaatatttcggtatgtttccaaaatgtaaggtcttttaagaatatataccagtatattttataatctaaaaaacaataattccttaatgttaaatatccagttactggttaaatttcctggattgtctcagttttctccaaatcagagtcaaataagatccacacaattcatttacttaatacatcacaagctcgtaacacgctcctcctcattttctttcctcacaatctgtggaagagacagcactatctgtcctttagaatttcctccattgtggattttactgactgtgcctttaacacaaagcccatacttctaaacttgataatttgacacctctaggctggccgtgctggctcatgcctgtaatctcagcactttgggaggctgaggtgggtagagcatttgagatcaggagttcaagaccagcctgaccaacatggtgaaacactgtctctactaaaaatacaaaaaaattggccaggcgtggtggcctgggcctgtagttccagctgcacgggaggctgaggcaggagaattgcttgaacccaggaggcagaggttgcagtgagccaagatcacgccactgcactctagcctgggcgacagagtgagactctgtctcaaaaataaacaaacaaacaaacaacctttagtagtttgatacatttcattttctgtaggtcagctgataaattttttttgtacattaaatttttacatgtttaagattgagatatgttttaaaatacactcaatcttttaaaaatcatttaaggtactttaaactcctttcaatacccgtcagtcagatttttcatcaaacatggtaaacatatacatattatatactctgcctagcacaataaaagaaatgtaattgtttgtcataccctatgcaaatttccaaccagaaaatacccagaagcatcttctaacactaaaacccacgtctctccaggaaagtttttccttgtgcatcgtacctcacaattcactctttgtcctcttcaagcttagttggatcctcttattttgttatttgtatgtgctattatttccaagtcatgtcatatatataactggtctccaactagattatccatgcctccttatgggaactaccatgtgttttaactgtaagacaatttttaatgatgtctgtgcacatgtagtttacaagtaaatttgcaaaaaatataaacaatatgagagagttttagctgatgccttatcctgtttaattctcaaatgtttatattttaaaaacacttaactgaagtattctaatggaggaaaaaatggcatgacaaagaagtatggaaatggcttacagttcttgactggctgtaggactgaacatggaatttgagcatgaagattttgagcaaaatactaggctacttactgtgtcttttttcttttttttttagacaaagttttgttcttatcgcctaggctggagtgcaatggtgcgatctcggctcactgcaacctctgcttcccaggttcaagcgaatctcctgcctcagcctcccaagtagctgggattacaggtgcccgtcaccacgcctcgctaattttttgtatttttagtagaaacaaggtttcacttggacaggctggtctcaaactcctgacctcaggtgatccacccacctcggcttcccaaagtgctggaattacaggcgtgagcaaccgcacatggcctactgtgtcttctttagagaataagactgttatgtttcaagaataaagcaaatgacaaatagtgaaaggctctcagttattcaaagtactgccattccagagcagctcctccagagtgaattaattttctgtctacttttcttcctttcaaaagttaaactgaggttagaatgttcaaattctgtatgtgatactaatttctctttcaaagagattgcttgaggccgagcatggtggctcaggcctgtaatcccagcactttgggaggctgaggcgggcagatgacttgaggtcaggagttcaagaccagcctgaccaacatggtgaaaccccgtctctactaaaaatacgaaaattagtagggaatgtggtgggtgcctgtaattccagctacttgggaggctgaggcagaagaattacttgaaccctagagacagacgctgcagtgagtgagatcacgccattgcactccagaccaggtgacaagagtgaaaccctgtctcaaaaaaacaaaaacaaaaaaccccaaaatgatcactcgagctcaggacttcgagaccagcctgggcaacaggtgaaaccccatgtctctacaaaaaaatacaaaaattagccgggaatggtggtgcaagcctaaggtcccagctactcagtaggctgaggagggaggatcgcttgagcctgggaggtcaaggctgcagtgagtcgagactgcgccactgtactccagcctgggcagcacagcaagaccttcacacacacacacacacacacacacacagagcaaggccttgacacacacacacacacacacacacacacacacacacacacacccccccagaagggtgaaggagcagaaaagtacagtgtattgaggcagggtccccctttcatccctactaccccagtcccacatattccacagggagaacttgcctccggctatctctagaagaatgagagaattttaatactaaatccaacagaaaaacatcttctttctcactttgaaaatacggtttattggaaaagagtatggtgtctggagtcagtgaacactgagttccaaatcctggccccaccacttagctagctattatcattgagcccccagtcagctactgagaaatcaaacaagttccaacgcacaatctccaggaataatgctccaactttagtaagtctaagaattgcctgagagagttaagtctcacgtacctttatgaagaaaaagcctcttagttattatgtaagatatctatgagaccatactttttttgttttgttttgtttttgagatggagtctcgctctttcgcccaggctggagtacagtggtgcgatctcggctcactgcaacctctgcctcacgggttcaagcaattctcctgcctcagcctcccgagtagctgggattacaggcgtccaccaccacacctggctaatttttgtatttttagtagagacggggtttcaccatgttggccaggctggtctcaaactcctgacctcaggtgatctacccacctcggtctcccaaagtgctgggaatacaggtgtgagccaatgcgcccagctgagaccatattttcagaaatagtccttaaagacactgaggtttagcaacagaacccatcttcaagaaaatgagttgaaccaaaaattaatttgttaataaacttaccagttcttaaaaataaatgtggtaaaaaggaacaaaacaaacaaaaaagtgaataaatagaagaaaccctggtacaggcaaggtggtgtagactctattctttctcccagctcatccctgttctaagcacaattataaatcctgcaaataacacaagaggcaatcaaaggaaaactctgaaagatagaaaagggaaggcaaactagttaaaggccccaggactaaaggaacaacacagtgacaaaagcatctaataaacactatccaaccgaaagaaggtaacccaagtttggcatttcctggcttccaagagagcaacaaagagcatctcagacaggctcattccctgcctccatataagggaagtatttccttcaataccagggaagcactgcagcaacagcaagggggatggatcaggaggtctgctaataataggaagccagaggaaacgttattgccccatttctctatttctttttacggcaaatactcattattctaatttgtctcttctcactgtttctttaacacagggtttcaacccactattgcaccaaagctgctggtcaaggtcaccaatgacctccactgtactaaatccaatttccacatttcagtccttaccacccttgatccatcaccagtatccaacaaaggtgagtactccctccttcaaatactttctccacttctctttcaagacatactaacctggcttttctattgtctttttgaattccttgtaagactgcatatgcgaaatcactaaatcttctttcctatacttcctttctaggtgatcttacccaaactcatggctttaagtatccaactatgtttctgactcccaaattcctacctcgagctgaaatcgctcccctcaactccagattcctgtttctacctgcctactcaacacttctatttgaatgtctaaaaagtgtctcaaactttacatgatcaaaatgaagttgatactttcccctccccaactcctatatgccatcccaaacctgcttcaactagatggatctgttcaggtcaaaaacctccatgtaatccttaatttcaaccccccaccacctctatctctctcataaacacactcaattggcaaatcttattggcactgtcttcaaatatatccagtattcagccacttcttgccacttcattgttagtactttggttgaatctttctagatgagtccaagagcctctaaatgggcttctagctctcacccttgaccactttcaggatattatcatgaacatagcagccagcctaatattgtataaaaggataagttcgatcatgtcactcctctacccaaaacctagcctagttgtttaccatctctaaaaacccaagtcctgacaacgaccctgtaaggcctcaaacagagagcctctatcacccaatccctgctacctctctggcctcatctcctgttctcctcctggctcattccattccagtcactgctgtttgctgaacatgttaggcaagctgtcacccacaggaccttttatttgctattcctaaagcagatatcctcactttcttcaggtcatttccttacatgacactttattaaggctttcccttaactgtcctataaaattgcaacccctctccaaataccccctacacacctttctttcccgcttcctggctttattaatagaaccttcatgaaaattatttttaattatctatctttcttactgtctgtttcccccactagaatcatatccggaaaacagagatttttgtcttgttcaccataatatctctgggtgcttggaacaatgcctagcaaatggcaggtactcaaatatttgttcaaagggaaggaaggaagcaggaagagagagggaatgagggtaacaggctggaactatgatcctaacttttccttacaaaagattaaaaccaaagtaattccagactgaagctaaccccttttctcatctggtgccaacagacctcataaaactaactctggcctcctcataaaactaactctggcctctaatgctgaaagcgagtcaagcaattatagtccacactcttagtccaagtatacacaaaccagggaaaataaagctatattacaaagtgaaaactactaacaagatatttgagagctcttctttttttggagataggatcttgcactgtcacccgggctgaagggcagtgatgcaatcatagctcactatagcctcaatcacctgagctcaagcaaccactctcacctcagtctctgcagtagctgggacctcagatgtgcaccaccacgcccagctaattttattttttcatagaaatggagcctcacgatgttgcccaggctggtctcaaactcctaggctcaggtgattctcctgcctcagccttccaaaatgttgggattacaggtgtgagccactgcacccagtctaatcccaaccatacacaacttgaatggaaacttgctgagggtactatagatgttccagagtaaaaacgtttccgcttttacacatggtaaaatacaaaattctcacatctcaatttctatgcttttgcaaaccacttactaacagaatcgtgaattatatgatacgtgtaagatagttaagttttattggcagatttcgattctgccacatcaaattgaaaaatattctgtcatgttcatcattatatattatataaatttgcctccctcaaaaaccacacccccaccaaaaaaaaacccttaagaaataatttttaatgacatagacctcaaaggttgagctagttttcagttaaagaatgactgagggcacaaaggtggacatttttaccatcctaaaaattggaagatatcactcccagggtggctgtgtgatttcaatgacataacatttttaaagtctagcattccattataagtgctcagtaaatgggaagttgctgctgctcttacaagcttctgactaccatacctggttgaactaactcagttaccacaaggtactctatgcccttacatctaatgacaaatatttgttttgaaaaacgtatactccttaaacacacttgagaaacaggaaccagagacccaagtacattttgttctgaatcaaattccagcatgcacagcaaagtgcatgtagaggggtgagagggtgactagggagactgcttcaatgggagattattctgcagtagtgccttaactgtagaacagtgatgatgataaactcatcctaaatttaggactactgacaggaacaagtgaccacagtaactgttcatcttaagtcgtaaaaagctttctggcaatactcatcttcaaaaaaacctagcatgtaggaaaaatcttttatgtgtttgaataagggtaatatagttaaagctaaaggcttagatttttaactggtctaatgagagaaagcacagtagtcatataataagaaggtttatgttttacttcattttactagtgtttcctcatgagaattaagtaacagaaattataggaatcacaaatgaagtgcttactccatgcaaaacactggtctggcacattacagatattaattcacgaaatcctcattaaaaccctgtcaagtgggtattatgatcatcactgccccatttttataataaggaaactaagacaataaggctaagtaacttgtctaaggtcacaccactaacaagcagagccaagacttgacataggtgctctgggccagagtttttgttaacagttggaatatacaaatttacaagtattactgccaaatcaattttctcaaaaataagtcaaagtggaggaaggggggagatgaccctctgaattcactaaggttctgtgaaaagatgctgaaacaaataaaaagagtatttgattgtcaaatatatgctatttagaaatactaatggaaaagaatactgtgggcaagaaaagaatcacaagtatttgtgctgagttctgaaaggagagaaataaggttggggtgggaggtggggaaagcaggtcaagcatggaatagagcatgaataaaaatgcacagtcagaaaagtaaaaagctatgtcctagatacaaagcagtagtaataggtagaaatagtattacaaaaacagcagtgtcactaggtatcaggcactcaatgcataactaaagagaacataaaaataattaaaactatagtgaaacaaataacaagaacatgtcatattcctggttgtgataactacctatcataattgtagtttttttcccttaaattattaagttggagcagttattttacgtctgatgcatttcttaagcggttttaaagaagggcatagaatatgtgatgataaatttgacacaataatttgagttcatgtgaatgagtgttcaaacattgccaagaaaacactgaaagataatttttaaagatggagtttcgctctgtcgtccaggctggagtgcgatggcgtgatctcggcttactgcaacctccgcctcccgggcaagccattctcctgcctcagcctcgcaggtagctaggactacaggcatgtgctgccaagcccagctaattttttgtatttttagtagagatagggtttcaccatgttggccaggctggtctcaaactcctgacctcagatgatccccctgcctccacctcccaaagtgctgggattacaggcatgatccaccgtgcccaaccgaaagagaatattaaggaagactctgcccaaccaattattaaaattgccattatacaacaagtataatcaatagatacggatggtatttgaactagactagacaaagagatcagcagaccacaaaatacaacatatacatccaagtatacatggcaacgtaatatgcaaagatgacatctcaattctcagaagaaagaacattgtatttaattgttgatattgatataaccaactacacatttgggaagaaaggagagggaattcctatcttacactacacacaaaaataaatctaaagtgtgttaaagactttagcataatcactgcattgggaggcattcttaaagaacagaagaaaagcagaaaccagaaaagtttattttttggaaaattaattaaaaattctcatgctctctgatccacttttcaagattcgatcccacagaaacgagagcaccaatacaataatgtttactatcaaggtaactgaaagcaactgtatttcccaaaggagaatggctgagtatattattgtacacctctatagggagtgttatataatcattaagaatgaagacaggcacggtggctcacacctataatcccagggctttgggagcccaaggtgggtggattgcctgaggtcaggagttcaagaccagcctgaccaacatggtgaaaccccatctctactaaaaaataaaaaaattagccaggcatgatggggtgcacctgtagtcctagctactcaggaggctgaggtaagaaaatcgcttgaacccaggaggtgaaggttgcagtgagccaagatcaagtcattgcactccagcctgggtgaaaagagtgaaactctgtctcaaaaaaaaaaaaaaaaaaaaaaaaaaagaatccagaccgggagtggtggctcacgcttgtaatctcagccctttgggaggctgaggcgagcggatcacctgaggtcaggaattcgagaccggcgtggccaacatggtgaaaccccatctctactaaaaatacaaaaattagccggacatggtggtgtgtgcctgtagtatcagctactcaggaggctgaggtgggagaatcgcttgaacctgggaggcagaggttgtagtgagccaagatcacactactgcattccatcctgggtgagagtgagacattgtctccaaaaaacaaaacaaaacaaaacaaaaaactgggcagataaattttttttttttttgagatggagtgtcactcttgttgcccaggctggagtgcaatggcacaatcttggctcactacaacctccgcctcccaagttcaagtgattctcctgccttagcctctcgagtaggtgggattacaggcatgcgccatcacgccgggctaattttgtatttttggtagagacagggtttctccatgttggtcagggtggtcttgaactcccgacctcaggtgacccgcccaccttggcctcccaaagtgttgggattacaggcgtgagccaccaggcccggccgggacagataattttagacatcaatttaagtgggaagaagactacaaagaatacaaagaaactagcaatgcctgaagacattttttgttgtcacaactgggggtggggggatggtacttggtagaggccagagatgccgctaaccatactacaacacaggacagtttcctacaagaaaatgtcagtagagctgacactaagaaaccttgctgtatatgaaccactgataagaataaaatcttagctttccaaggtcaatcttgccttttagccccatcatggccccacgtgtttgcaggttctttggctaagccaccaaatagctgttatggtctgttaacaatcaaatgaatggcaagggagaagtttaagccatgacccagcatttaaaaaataatggaaaagaatacaacagaaaactaagagtatgcagcatgcagagtatgtggggaaagtaatttttgttaaagttaggcatatgcaagcctttgtgtctctcaaatttacctgtaggtataagtggggcaaactgtttatcgcacggtagatcatgctcaaagaaagtcattcaagatactcctcagttctctcatccaaaaaactcatgagttggactaaaaaaaaaacaaaaaaacctacgaggcactttctttataaaatgttaatgaatttatgatcatctgcatgaagtctaccctgtatgtacagatgtaacctacatgggagggggtacagtccttataggtagacacctgaaaggctcaattcatttcagatgtttcaagaaaattccttagtcaataacattcacatagactttgtaagatcttgattaagccatgaggccaaatctaaatctaaatcacccactcagaaagtgccaaaaaccttaaaaccaaaagaaacattagagattatctatctctaagcatctcaatttttaaatgagtaaaatgagcccaaaatggggcccaaaggattaaatgatttgcccagagtcataagccaagtcagactgtcaaaccgttaaagcaaactgataagaaaaagatgctcagggccaggcatgttggctcacgcctgtaatcccagcacaatgggaggccgagtagggcagatcacaaggtcacgagttctagaccagcgtggccaatacggtgaaaccccgtctctactaaaaatacaaaaattagctgggcatggtggcaggcgcctgttgtcccagctactcgggaggctgaggcaggagaatcgcttgaacccaggaggcggaggttgcagtgagccaagatcgcgccattgcactccagcctgggcaacagcgagactccctctcaaacaaaaacaaaaacaaaaaaactaaaacatctaactgaatcaggctgcttaagtatcaaaataatcttaaatatctgaagaggaagaaggataaagattccctaacatgcagaactaaaactagaaaaactttattctaatgttcttagactactatcaaattctccctaggacttctacattgctgataacagcttacaatatttttcccagtttagttaagaccacatgtcagtattttattacaatctttcaagcaagaaagaaggtctctgatatactaatttaaagacatatacactcttgatagagctatattaggaaatggcaatggctaattcgtaaactagatttttaaaaaatgacaatatcttgtttaaagttattagactatgacagtcatctgagtggggaggtaactagttccccagcagaagccttaatcccattaaggtttatcagacaagtgtataacagaaatgttcatttcttctcagaaggaggttatgaattatatcacacggattctgtttagatgaggtttagaacaatttttctttttaacagtttctccttttgatttagacactctctaaagatctgtccagatttaggtccatttcactgaaattttgtactaaagtccacgaatttttttcattttttctttggcaaacaggtatttttgtaaacccaagttttatttatttatttattttgagatggagtttcgctcttgtcatgcaggcaggagtgcaatgcacaatcttggctcactgcaacctccacctcctgagttcaagcgattctcctgcctcagcctcccgtgtagctgggattacacgcgcctgccaccacacccagctaatttttttatttttagtagagatgggattttgccatgttggccaggctggtctcacactgctgacctcaggtgatccacccatctcagcctcccatagtactgggactacagacgtgagccaccgtgtccagcctgtaaagcaagaatttttaaagagcaaaaagaaagtgcagattttctgtctccttactacagatgagaaaatagtataaagctatcgagtgtcaacagttctatattacccccgtccccacccccactgtactgctcctgaaagctaaacagaaatcccaaggaaagtatacattcaaggaacgaagataactttagatatgtattacatgatgcatatacgggttttcagtgaactatatgtgatttcaaactaaattaaaaacaaggctttactatgacattatgaatgaaaaacagtttatttataggatactttgactctactcaaaaagtatgcttaaacaatccaacaactttaggaaagccaaccgataaatctttgcaatcaggcagaaatactaaggcatttaaaaaacatacccagaccgcttttaacatttaccccagagatctctaggctcatcacagagggtaaccacaaaatgcttaagctgcatacagacatcaggcaaatgccacataactgctggacagtaagttatcaccacagtagttaccaatgtgacaaagcagaggataaggagcattcagagttggaaactacggtggaaacgtttccatttatggcacattttctgattggttttataactcatgttactaactatagaatcatagacgagaagaatccccggaaccaagcctcttataaataagtcaactgacctgaaaaacttacgacagagtgaaaactagacccaacttcaaactgagataggattttatacttcacaaaaattaaagttagttatttagattttattagaaatagctcagcacgtaaagtcctcaaaggaaacagacatacagtcaaaaaaaaccattactgcggggcgcagtggctcacgcctgtaatcccagcactttgggaggccaaggcaggcggatcacgaggtcagaggatcaagaccatcctggctaacacggtgaaaccccgtctctactaaaaacacaaaaaattagccgggcgtggtggtgcgtgcctgtactcccatctactaggcatgctgaggcaggagaatggtgtgaactcgggacacggagcttgcagtgagccgagatggcaccaatgcactccagcctgggcaacagagcgcgactccgtctcaaaaaacaaaaaccaacaacaacaaaacattattaaactataataatgttttctatcaagacacaaaatattaaaagtagatcaggaaggaataataagtcaattcattatcaaccttgtgactcttctgtccagcctcttccagaggttccctttacttttaagtgcaatgcaatctttaaccttaactctaaaaactcatttagagtcctccaatttcttatcagttttccaatacagctcaagaacttttccatcagtgaataaaagttgcattacttttccctttcacagcttgttggcagggaattattttaaatgtacaacaaaaatctataaatctgtagcttccaaaagagtgtttgaaaatatattttaaatggcaaaataatctcagtaatcaacagtaatactgaagtaatgtttgaaaattacatttttagaaagtataaagttacatttattacaagtgaagaaaaaaatttttatgagggaatgtttttaaaaagggttacaaattctttgacacttctcccaatgagaggcagatttctgtcaattccccctcaaatctgagggagcttgtgaccactttggtcaacagaatatggtggatgtggtactagatgactttccaggacaggttataaatgggtatgcagcttcaactgagcacagagacttcatgttaagagatattataaccctgagaattccatgctgaacagccatgtgcacacagtacttgacgaagcaacccagccaagcaaagctttctagccattccttaaaagctgccagacttatgggtgaagaaactatctcacaaatttgtgtatggactctccttccagtaacgtaaattccaagagagtaggaattcgtctttgttttattcactgatgtatccacaccattttaatagtttccttttatgtatgcagtaagcattcaataaaggtctgttaaatagatattagtgatggtggcagtggcaggtggagaaggggatatcctattcatgaatagttcacagcagtaaccatgtgcatgcctcgcaaagcagccaaagattttcagagagtctatctaattccaatgaaaagcccaggcttttaaaacggtattttacaaagactgatggatctgactaaagaaatttaaaacttctatcattcaaaaaccataaaaattaaaacataaataaataaaaagctagggaaaacaatttgcattttaattatgcttttaaaatgcaaaaaaaccctttcaaataactcaaaaagacacaaagatttacagatttctttatataaaaaagtgacaaataaatacaaaagaaatacactactaaatcaaccaaataaaataatccaagaatgtcttttttgtttattaaattggaaattctttaaaaactactatctgttaggcttcagaacactgctgacaaaacagcagtttcattctggagaacataacatttctcaaaagccttaaaactgtcattatcccatgaccactccccactacccccaccccagaaaaagtccacatctagaaatttaacctaaggtaataatctgtgatatgaagcaagctttacacacaatgtttttaaactcttagataaaagagcactaactgagggtcatgttcccgacgttagttttatttgcttgtagttgggttttcttcggccttcacaagtgtgtcaaaaaaaattcagtaagttgccagcattttaaaatctattgcacacaaacacaagatctgccagcactgggtctgcaagcctcttaatgactattagctaaacagtagccaatcccttcagatgtggcacatgatacacagttcaaaatcatccctaatctgaaagcttggttcatttacattagatgctttatcttctaaagttatctcagttggaagccctacactagagatcaaactttaagcatgcagggcttgctaaacgctgattggtgggccccacccccagagtttccgactcaggacatctgaaatggggtcccagaatttacatttctagcagatttctaggtgatggtccaaagactacactttgatggtctagagaccacattttgatgaactttccttgctgaagccagagagaggcctagcatcctttgaattacacaattacaggatacttaaacaatattggagattccattaatgggggagggaggcaaggaagagtagaaaagccgacggataaacaaccaatagtcagtgcactgcttccctctatcagaggtggaaaaccattgccctacactaaatttaagaataatcctagattaagttgctagtccaaattttctattctacattctttctcatgggccttatccatttctcaaggtttaatgacctcttctacacttcatggataaaataacaggggtaaacaaaaattgtggtaaaagatcccacgtagctccaatattttatgactaacaaatgtgtatcaccagccttaatattttctactgaatttgctttctccagctggatcctatacatagcagcttttgctgaatgcttcctttgttccgggcattgtgctacaacattacatgacttttcatcatttcatcattataacaactctatgaaacggtgcctactatccccatactacagatggagaaaaagaggtcatttgtcaaggggttaggtcatttgtcagagaagcaagcacaggtaaaatctacatctgtatacgggtaatctggctccagagtcctcaattttctttttcttttttttttttttgagatggggagtctcgctcagttgcccaggcgcaatcttggttcactgcaacctccgcttcccaggttcaactgatctcgtacctcagcctcccgggtagctggaattacaggtgcacgccaccacgtccagctaatttttgtatttttagtaaagacgaggtttcaccatgttggccaggctgctctcaaactcctgacctcaagagagctgcccacctcggcctcccaaagcgctggggatacaggcgtgagccaccacacccggcccagagtcctgaattttaaccactacacttcatctaaaattcaacttgtacaaattccaatctttcatctaaaactagctcttcctctaaacttgcctactgtcaatgttttcaccttcctgctcaggctgccaggctccaaatcactaagttcctaccataattaagtccttctacatttcacatctgtctttttctttttatttcaattgacctaaatgtccttattcacccttcacctggcctctaaaatgcctagtatttctgcttctagtcttacacccaacggtgctcctcactcattgcctatgggtcaaaggccagcttatttaacatcaaattcaatttaagaccttacctacctcttggatccatttctgtggttccacaaacagattaaaaattatacttaaaacacaccaacacacatgcagagctttatttctgaagaagaagagagaggggtggaaaggaaaaaacttaagaaacaatgttcaatctgaaagtatcacttctaagtggaaggctacaagggataattaatagctaccaaaactgaacactgaaacatcacatccctctttcatggagccatgtaagttaaaaaagaatcttaaactgttgaggtatatcaacatagacaaaatctgaatgccaaagtgagtttcactctaggatcaggttatctggcagctcctgaaacaggacagtttcaggaaccctgtacaaacctcagtgaaatgaaataacttcaagctgtttgttacaggggactcttgtgtcttttagtctaagtaaaagcagcaattttctacaatatatttatataagctgtgcatttccatgaaagaaaggaggtctactgtggatatatgcttggtatgaaattatgtcagaaacaagtgggagcgaggggcaagtcaacatgctgtcactaaataaaagacagacccccagaaatgacctcaacaatcaaagaaaacatgatagtgtaagttaacatgattaattttttaaattaatagactatattttaaagtaatttgaggtttaatgaactgagtagacagcagagtacccatataccctcccttccatttcctttgcacatttattatacttaatgagccaatacttgcatattcttattaaccaaagtccatttacatcaaggttcgctttgttttgaattttgacaaatgtaaaacatgtacttaccacgaaattttacaatatgcaataccaaaaaatacagctagattcaaagagagaatgtttcagcatctcattatctttatcacagtaacataaactgaactccgatcttctcccctgctcccacctagttttcccagtcttcccatctcagtaaagagcaataccttccatccacttgctcagaccaaaaattccttcctcttttataacccatacatccagcccatcagcaaatcctacctgctctaacttcaaaatatatccagaattgaaccttaattctcacactttaccaccaccactggaacccaagacaccattctctcactaggttattatagtagccccctaactcttttttttttttttgcttctgtccacaaactaatcagatcatgtcactcctctactcaaagcaggaactggcattctaccttagagcaagagctacaatcctcacaacaggcctactaggttccacacaacctgtctccacctacctcagttcccttttctgtctatgacttcacctcctgtgtcctcttcaccacttgctgttgaagctacactggtttgcttgccggattacttcaggcagtctctgtccttaaagttttggcactggctgttctttttgtccaaaatatcttccacaaatgctcacacagctgacttcacatcctgacacaaatatcactttcatagttaggcctttttccctgatgaccctatttatcactgcattgttttcccctgtactccttatccctcttacctgctttatttttttctgcatagcatttgctgcaaccaaatatatattctactttgttattttattgacccccccaccccactagaaaataaatgcagcaactgaggtttctggccttaaaaagcacttagtaattatttgttgaatgaataaactatggtgtacagattctcctcaacttacaatgggggttttgtcccaataaacccatcataatttgaaaatatcataagatgaaaatgcatttaacgcacctaacctactgaacatcaaagcttagctgggcctaccttaacgtgctcagaacacatacattatcctacagttgggcaaaatcatctaacacaaagcctattttataacaaagcatgaataactcatttactgaagactgtactgaaagtgaaaacaacggctgtgggtactcaaagtacagtttccagttttcacacgataataaagttgaaaaaccataatttgaactatagtaagttggggaccatctgtcaaggttcctaaaggtgacatacaggtgctagcaactacagtctaaaaaaataaagccccaattctcaacaaatcagtaactgattctggaaacacagaagttcctttgactctcttaaaggcttcaagcccctctatcagaaaaaaatgtctacagtttgaggagactagcctgctgccttcgggatgtccccatctgttttctagccactaacacagccacaaagcataccacacttaggaacagatctatgggtaggacacaagcatatttaggctgctatcataaagataaagatgcattcagccataaatacttaaacaagtattcatactggaaatatgaaacacttttaatcatattcctaacaaaagtaccacgagattaactggctgagaaataatgggggtgatctcctatcgactacaaaagtgggttagaaactgaagtaatctaacctcatcaagcaagtaaagcttcactttactgcactttgcagatgctgttttaaaaaaaaacaaattcaatgtttatggcaaccctgcatcaagcaagtctattagcgtcattcttccaacagcgtgcactcacttcatgtccatgtgacacatttgggtaattctcacaatatttcaaatgttttcattatctgttatgatgatctgtgatcagtgatctctgacactgccattgtaatttctggaggtaccacgaaccgcacccataaaagatggaaaacttaactgataaaaatgtgtgttctcactactccactgaatggccattcccctgtctctctccctctcctcttgtttccctattccctgaaacacaacaatattgaaattaggccaattagtaactcctcaatggcctttaagtgttcaagtggaagagtctacagctctcgctttaaatcaaaagctagaaatagacacttgcggatgttttctggtaaaatagctgaaagaaaagaattttttttagagacggggcgcagtggctcatgcctgtaatcccaacactttgggaggcggcggcaggcggatcacctgaggtcaagagtttgagaccagcctggccaacatggcgaaaccccctctctactaaaaatacaaaaattatgtgggtgtggcattgcgcacttgtagtcccagctactcaggaggctgaggcaggagaatcacttgagcccgggaggcagaggttgcagtgagccaagatcgtgccaccacactccagcctgggcggcagagcgagactccatctcaaaaaagaaaaagaatatatattttttaaaagctagaagtgattaagcttctgagaaaggtatgttgaaagccaacataggctgaaagtaaggcctcttgtaccagttagcaaacttgtaaatgcaaaagttcttggagaaaatttaaaaagtgctactccagtgaacacacaaatcgtaagcaagagaagcagctttattgctgatatggacaaagttttagtggtctgtatagatcaaaccagccacaacattccattaaactgaaagcctaatccagaacaagaccctaatcctcttcaattccatgaagactgagagaggtgaggaagctgcagaagcaaagtctgaagatgacggaggctgctttacgaagtttaaggaaataagccatctccaataacctaaaagtgcaaggtgaagcaacaagtgctgatggagaagctgtggcaagttatccagaagatctagctaagatcatcgatgaagatggctccattaaacaacatgtcagcaatgtagaaaaaacagcattctattggaagacacaatccaaaacttttgtggctagagagtagaaaggagaaatcctgtcttcaaagagaggagaatgcttgacttcaaagcttcaaaggacagcctctcttgttaggagctaatgcagctggtgattttaaggtgaaggccaatgctccttgaccattctgaaaatctaaggcccttaagaattacactacatcagccaggtgcagtggctcatgcctgtaatcccagcactctgggaggccaaggagggagaactgcttgagcccagtagttggagaccagcctgggcaacacggcaagaccccgtctctataaaataaaataaaaacaaattatgctacatttactctgcctatgctctataaatgaaacaacaaagccaggatgtcagaacatctgttgacagcatgttttactgaatattttaagtccaccattgagacctcatgctcagaaagattcctttcaaaatactgctgctcactgacaatgcaccattgccggagaggtctgaaagagatgtacaaggatataaatcctgttatcatgcctgttaacacaacatccattgtgcagcccacagatcaagcaataatttccacttctaagccttataatttaaaaaatacattctgtaaggctatagctgccatagatagtgattcttctgatgaatctgggcaaagtaaattgaaaattattctggaaaggattcaccattctattgagtcactcatgattcatgggaggagttcaaaatatcaaccccaacaggagtttggaagaagttgactccgactctcatggataatcgagaggttcaagacattgctcgaaaaagtaactgcagatgtgaaaaacacagcaagataaccagaattagaaatagagcctgaagatgtgactgaactgcaatctcgtgataaaactgaaacagatgcaaagttaagttgactctgactctcatggataactgagaggttcaagacacaggtcgaaaaagtaactgcagatgaggaagaaacagcaagataactagaattagaaatcgagaattagaaggaaagaaagggaaggaaagaaagggaagggaagggaagggaggggaggtagggagggagggaggagggagggaggagggagggaggagggagggagggagagagggagggagggagagagggagggagggagggagggaaagaaattgccacagcttccctaaccttcagcagccactaccctggctagtcagcagccatcaacatggagataggaccttccaccagcaaaaaagattatgactcacttcatgaaggctcaggtgatcgctggtatttcttttagcaataaatattttaaaattaaggtagtccactatttattatgacataagcctactgcatacttaacagactacagtatagtgtaaatgtaacttttatatgcaataggaaacagaaaaagcccatgtctctcactttagtgtgatattcactttattgcagtactgtggtcatctggaaatgaacctgtgatatctctgaggtatggctgtattttcatacaaataaaggcactccccctaaatctagagtctagatcccaaatacatctgtccatatagggggtaccactcccaagaccaaaggggtgtatggctcctatctccagccgtaccaaatcatatatacagtgtaatatctggttactctttattcaggacagctacattcaaaggaaacataaaatgggcagaataaggactccttgctcattaacaaaacaaagccaactcttatgtcagagtacccttttgatcaattagtgtgattatgttcactagtaacagattctaccatcattgttgtccatttcatttccattctcaagctttaaaaccccaaaaggacagaaagagatactacaggctagtattagtaatactaaaaatagttacctcttattgaaacctgaagggcctggtacttgacatatatcattttctaatctttatatgaactcaataaagcaaatattgttatttcaacactattacatattagagactgagcaatctggacaaagtcacacagcttatcagtaccagtaggaattcaaactcaggtctgactcaacagtctgcattcttaaatatacctcaataaagctgttgaaaaagtaaaagtcggccgggcacagtgtaatcccagcacacctcaataaagctgctgaaaaagtaaaagtcggccgggcacagtgtaatcccagcactttgggaggccgagtcaggcggatcacctgaggtcaggagttcgagaccagcctggccaacgtggtgaaatctggtctctactaaaaatacaaaaattagctgggcgtggtgatgggcgcctgtaatcccagctactcgggaagctgagacaggagaatcactcgaacccaggaggcggaggttgcagtgagtcgagatcgcgccattgcactccagcctgggtgacaagagtaactacgtctcaaaaaaaaagtaaaagtctccatctttccactagaccacactgcttttctcaatctttatgacaaacatgtaaggcatattgggttctggataatatgtcaaggagatatactattttggaatattttggcaaataaaggggggctttaaaacatgaaatttttttttcttaataagaactgtaatctatttccccaacttcattattaagtgagttttaggcctaggtcttccagaacagtttcctccaaaacatacagtgtaatatctggttactctttatgtgtgcataagaaatgtcactgtgacaaatgttataaagaaaaaatttgattaccctaaaaacaaatacataaacagcccgcaagtttagctcctaaagtaggaaagaataatgtgaaaatgtttctggctgtaccactcaacaaaaatttgcccgccaataaggaatcctttcttcaaaaattggtcatgatcattagccaaactgtaaccagtaacatccagctggattatggagctaataaagaacaacagaggggatccacaggaaattcaacaggtaatttacaactggctctctcatcagactggcagactgggtctaatccaaggtcagatgacatgggggattatggaagccaataacaatcatatttaaataaatgtcctttacagaacatcaccactttcctcataaaaagttcaaaggactattttcacccctcacaattacagtaaggataagaagcccaagcacagcttgaagcagcaaaattttctgaaaaggaattgaattctgtgttctcttcaggatcttcctttcccaataatgggggtattaaatttcacttataaatcaaactgaaagggaaaaaaagaacaataaaaaatgagctggaaaacctacattcatcatcttcaaaacaacatcaagttagaaacagttttaaagcaatgttacaactcctttagaatctggcaggttttctggtttttaccagatcccgctccggcaacaacaaaaaaagaaacagttttaaacagttttatgggcgtggtggctcacacctgcaatcccaacactttgggaggccaaggcggacagattgcttttcagcacaagagtctgagaccagcctgggcaacatggtaaaattttgcctctataaaaaaataccaaaaaataccaggcatggtggtggcacactcctgtagtcccagctacttgggaggctgaggtgggaggactgcttgagcccaggacagcaagggtgcagtgagccgagattgcaccaatgcactccagcctgggcaacagagccagaccctgtctcaaaaaaaaaaaaagttaaatgctgatgactgaatagaacacaattctctgtaaattcttcaatgtgataaagcatttcctacaccagttaccagtggcagcacctaataagacttgagagcaacttaatacttcaccctcatgtatgtatgaatttaaaatagaacatcacaataactacgaagatacccaaacaccccttccctaatttttttttttggtacaaacaaagtctcgctatattgcccaggtggatctcaaactcctgggctcaagtgatgctcctgcctgggctttccaaagtgctggggttacaagcgtgaaccactgtgcctggtcgcttccctaattcttaacatgtcccacaaaagattctgcttgatcttggcccccactatatcatcactatctctagtaaatagactcaaagcctctgctttctctgtggctctagccacactggcagagaccaaaggagagttcaatgataggccctctcacagaaccttgtgccttaccatacttgtcagttacaattttattcactcgattcaagcattttttggatgcctcatatgtttcaaggtacctttgttacagcagtgaacaaggcaaagcccctaacaggaggaaattcacattccagaggtaagaagagaattaaaaagccaaaaaaaagtgtgtgtatgcatatatatgtgcataagaaatgtcactgtgacaagtgttataaagaaaaaaaacacagtaagaggacagagagtgaagttgtccttgtacagttgacagtcaataacacctcttttaacagtagtagagacctgaacagggtgaagaacagagccaagctgacaggagatctggattaaagctttccaggcagaaggaatcgaaaataggcgggaatatacttagcttgttgagcaaggcaaacagcatggctggagcacagagagccaaaagagaggtgataaagacaacaccaatgaggtaaataaaagcagacagaacttggatcctctagagcctgcagctcacgatatggagtttgaattttagtctacgtgtgacaggaagcctttgaagaactttgaggagggacacggatgtgttatcgacacactataaatgaccagtaacttcagaagcaaggaggccaactgggaggctgcgaaggttgtccaggcaaaggatgataatagcttagactagggtgatggtagcagtcaaatgaggaatgttatttattttcagaatgtaatctgaaggtggagccaagatttgccaatggaatagaatgtagagatgaaaagaaaaaaaaatctattcatctctgcatcccctcagagaatgtacctgaccaccatgaaagcaagggccatgtttgtcctattcaggtccttgaacaaaggaacagtgcagtatgttctagttgaattaataaatgacctgcttctttccctacagaatcacaatattggcatttattttggctggcaaatactggtacgatgtcaagcatggaaattaagcaccttaggagaagaaaagggagttaaataaaaaagagatccatgtttcactgaacttgcaaattcaactcaaagcaccacctgtctgaaaatggaacgtatatatataaaaaaactgctcattaaggaaaataaatcacagtatctcagcaacagtgctttgtcgtgagttacaagattggctacaccatctgacaggattacttaaattgacaaagacctgcctcaccaaacacagctagaggtccttgggtccttgtggtactggtatcaggaatctgataaatcagtcagagtgtggagtgtttttaaaacacagacaaaatatatttagcaagcaaagtctgttaaagggaagattggagatcactttaaaaataattcaaagcctactctaagtatttgcaaaattgtaagattatatttctgtgcttttgaataagattcagattggacagtctcaactctcccttgtgggagagggtaggggtgggggtggacctgttttctactaagaaatttataggactctccaaaaacagaacttagggcagtactccttaatagtgaccatacattagaatcatctagggagggctgggcacagtggctcacacctgtaattctagcactttgggaggccgacacaggcagatcatttgagcccaggacatcaagaccagcccgggcaacatggtgaaatcccatctctactaaaaatacaaaaattagccaggtatggtggcatgtgcctgtagtcccagatgctcaggaggctgagacgggagaatcacttgtgcccagaaaggtagagggtgcagtgagctgagatggtgccactgaactcatgcctgggcaaaagaatgagatcctgtctccaaaaaaaaaaaaaaaaaaaaaggaatcaactagggaggcttttaaaacatgaatgctggagacccacaccagataaattaaatcaaaatttaatcgggggtgggtcctgggattttccctttaagtgtttcccacgtgatctgaatgtgcagcccaagttgagaatcaccaatttacagcaataaagtttaaagtagaggatttaaataaaagtcttttaaagaaacaacactttcagaagtcaacaaacttgagccttcatgttaacacgtgggggtcacagtgggcattttggagcacagataaaaggacctgctttggaattgtaaaaggctgtttcatacatacaaacagttcaggaaaggatagaacgaaaacaaaaacaagaaaccttgattaaccccaccacattccttcccaagggcttgaattttttaaccgaacactacaatagcaacaaacctagagagtcagttcaagacggcttctccctgtaatgctgccttagaactctacagaacagcagtcactgctgcacagctaaatacatctccagccaaggaaatctagacatagaagatagaaaataacatcccagtttgtccctcctctttcccctccctcatcacatatcaacagctaactttgaacacatctgtggttcactgtaccacttacaggggtacagaggaatgaaattaccagtcctcactgtaaaataaacacatttctttaagaaattctataaagcacaagaggaaagcaaaaccttagtaaactgacaaatgttcccattctcccagcacatgaagaagactgccacagtctttttcaattacactttgaaaccctctgtcctggttttcaagcacaagctgatcttcacctcattatagatactcaaactgccacccgtcttatttttaaatatcagagaagtgacaaaattctatctatgatcaaggatgtattataaaagagaagaaattttgcctggtttttacatttatttaagtcccttctacaatgaataaaaatggttgttcaaatcaatgggtgaatgggaatacaaataaaatatgggtagcattttaaggcatggtattaaggctaacatgatgtccatctaacatccagtttctgaaaatctgaaatcagaacacaggaccttttcatttcaaatttacattaaagttcagctcactgattaagcatttccctcaataaaattacatttgtcataccttaattgtgcaaaagctgcaaactggtaaaaaacttgaatgccatggcatgattattcaaaaataactggtacaccctatgcctgaaacctgagtgcctactgtgaacctgccaaaatgattacaatgacaacccatcatcttcatcacatgaattactgcaatgtgaacagtattctgctgagcactatacagtaatcaaaagacaagctccacatcctcaagaagcttataaatttgactgaggagatagggctgataggcaagatagcaataaaacacataataagggcctaaatcatgcagtacaaactaagttttgaataccagttcccagcttgcagtctcagacatagatagcaacaccaccaccaccacccttgccaagccaagtaagtaaaaagtaaaatgagtaggctaggcacggcggctcatgcctgtaatcccagcactttgggaggccgaggcaggtggatcacaaactcaagagattgagaccatcctggacaacatggtgaaactctgtctctactaaaaatacaaaaattaactgggcatgacggcgcgtgcctgtaatcccaactactcgggaggctgaggtaggagaatcacttgaacctggaaggcagaggttgcagtgagtcaagatcgtgccattgcactcctgcctgggccaaaacagcaaaactccatctcaaaaaaaaaaaagtaaaatgagtatacaggagtcctaaaaacttgagaaaccaaaggaagcaattcatttggtcaagagaaaggtcagggcagtttcaaccttcccatttatttagctgtgtgactttcaacaatttacccaaccctttaaaggaagatagtacctactaattaccatgagaaccaaatgagatagtgtatataatgcgctttgcacaatgcctggcacatagtctcaaatactgcctattatcattactgttagaaacagtaaaatcctagtgttggcaggggcctttcaataatccaattttccagtcgaatagttctcagggtgtagttaccatcagcatcatttgggaaattgttagaagcccatactctagggctccactccagacccactgaatcataaattatcaaatctgcgcccagtaatctgtgttttaacagcactccaggtaattgtgatgaccattaatgttagagaattgctgccctaattaaaccctctaattttacgtataaagaacatggaggccaggttcagtggctcttgcctgcaatcccgacattttgggaggccgaggtgggagaaccacttgagtccaggagtttgagaccacgtaatatagttagaccctgtctctgaaaagaatacaagaattagctaggcatggtggcatgtgcctatagtcctagctgctcgggaggctgaggcagaaggatcacttgagcctgggaggtcgaggctgcagtgagccatcatcataccactggacttccagcttgggcgacacagcaagaccgtgtctcgaaaaaaacaaaagtaagcagatggaaacctgaagagataaaataacctgctcaaaaccacaatcatggagactgtttgtttagggtccattatatgccaagtaccagggtgaccactttttacatttttaacatcaggtcctcacaacagcccagctgggccccaattaacagaagaaaaactgaggttcaggtgtgagatggatggagtaatttgtcaaaggcggctcaatttttaatgggcaaaattaacattcaaatccaagttgtatgtgatcccaaacccttactgaaaccaggaccactgagtgttctgagggaacgataccaagcacacgcccagacttccccacccaagggcatcgttcttttcattctatcataccaccttagctgcaatgattttaccatgaaacataaccagaaattagcactttaaagcaactctcagaagacaggtggtaaacgattcttcactccaactagaaaggaaaaaatgacaacatactatgaaaaaagctatgaggcaggaaaaagcacacgtcaaggcatggagatacggatatagactaggtaattttgcaaccacataagtgaaagaaaatttgctatccaatcttcctattctctactcccaagagcctagtgcttttgtatagttttcagctcagtaaagtgcctccagatttataaaagctcaatgacaataacaaggtatctttattacaaaatagttgttaaaagtttgattcgaaaaattttaaggaaacctttcaggtaactgaaagtggagggtaggggcgcgactcatgaaggagttttttaaccaaagaaatgatatgatacatttttaaatgaccacttcagttgcaatataaaataacagattttggaggaaaatgtcaatacaaggatatcaattatcaattattaggttactatattggttcaaggagagatgatggtggctgtggagatgagtgaaatcaacagatccaagatatattttagagagtattgtagaagactaggaatgggagtgaccagacaggaatgaagacttctagacttactgcacactgtcatgaggaaggatggggatggaagggtacagtggaataagctgggttttagcagaaggaatcaagagccccattacaaacacattaaatggcctggcgtggtggctcacgcctgtactcccagcactttgggaggctgaggcaggcggatcacctgaggtcaggagtttgagaccagcctgaccaacattgagaaaccttgtctctactaaaaatacaaaactagctgagcgtggtggcaggtgcctgtaatcccagctactggggaggctgaggtgggagaatcgcttggaccctggaggtggaagttgcagtgagctgaggtcgcgccactgcactacagcctgggcaacaagaacaaaactccatctcaaaaaataaaaaataaataaaaataaacacattaaacgtttataatgtatttacaagactaacaatcagataaagtctgaacttcagaaaggagatagagctgacctgaaaatataaattacgaactattgttatatgaatgttacttaaaagacgaggaggccaggtgtggtggctcatgcctgtaatcccagcactttgggaggccgaggcaggtggatcacttgaggtcaggagttcaagaccagcctggccaacatggcgaaaccccacctctaccaaaaaaaaaatacaaaaattaatcgagcacggtggcatgcacctgtcagcccagctactcaggaggctgaggcaggagaatcacttcaatctggaaggcggaagctgcagtgagctaaggtggtgccactgcactccagcctgggcaacagagtgagactcggtctccaaaaaaaaaagggcagaagatggggcggaagaatagagataggaaagaggaggatgttgagaactaaaccctgaggtacttttagtattcaaagtgtaggggggtctggaaatcttgtagagaccagtaggggttggagtatgacatcttccaataatgaattctcgttgctgtccccttatgggtctgggtctacctgatagtctcttctggaagtcggtatcacttgtgcttaatttctactcttttgtgccctctatacagcctctactacaaatcttttttgaagaagcacagggagaaataacttggggaaaaaaaaaagcctatcttttagaaatagattctgaaatatttacagatgaaataatatgttgtacagaattggcttcaaaatagtccaagtaaggggtggtctagataaaaaaaaaaagaacagctctgagtagatgcctgttacagttgggcaatgcacacatgggaaggttcactgcactggtctctctgaatatttcacaataaaacataaaacatagtatggaaggttggcaaacacaagtccatgagaaatctctccatcttacccagattaacgagagatacaaccaaggatccacaggtttgatgcagacattctaaaagattcaattataccaagactttaaaggtgacagatttttttcccctcaactatacatttttttttttttttttttgagacagagtctcaactctgttgcccagactggagtacggagccataatcatggctcatttcagccttgactttactggctcaagcgagcctcccaagtagctgggactacaggcatgccccaccatgcctggcttttttttttttttttttttttttttggtagcgacaggggcctgctatgttgcccaggctggtctcaacctcctgggctcaagcctcagcctcccaaaagtgctggattataggtgtgagccactgcacctggcctatattgctatcttaaaatgtctcagtgacccaacaatttgccaaagagcatgtagagcaaactaggctctattcagcatttccatttcttaatgtatctatttgatttcaataaaatttcatcattttgaagatctctcccattagcttgggaaactacagaaacatgcacataactactgagaaggtatcaagtgttcctacactagtttaaaaaaatcattcaacacccacataaattctgatatgcactaggctgaacagctgttaaccactgagaagctgggcactgcatcctctccctgggtcaaaactctatatgctaatcaaacagggtcatgtatttgggaaaataataatccatggtaaaagtcacaaaaagaccttaattttaaaatgagaattcctaatctatacattctttaaaaaatctagggtatataggttgatgtaccttccttgatcaaaactcttacttctctgaagcctgtcagagtattttcaccacaaggcttggattaggtttcattttacatatgcatgcacatgttcacatacccataatcatccttcttagtagtatatagagacggaccatatcgttaccctcttctgctcaaataaatgtcttcccctacaaatgctaaggagtaaaatgatccagaaaaagtagaaatttggcataatcagcactgacttcctcaacggtaacatacatgacataaacacattaggtagactggatgcccaaaggccaatccaacctcatgtcttcctggcatttctcaggcctttctcgtcacccaccccacctaggttccacgtttccaaaaaagttccatgaagattcaggaaaaaacaaaaagggaggaaaactcattttattaaatttacatcatatccttcttcccagggttcaaaattaaataaaaccaaaagaagaaaaccagaaagacaaaagcacttttgtccaaggtggcaaaacacaagagcaatttaactgccattatgaaccaacttatactaaaatagtatttcctggaatgtgtataaattaaaaaacaaaacaaaatgttcatggttacttttactttcagggttgggaactgaatcccacaaacagcagctaaacctcaaaaaaattgtaattccctaattatttccagattaaaacacttctcttgaacacatgtttctgctgttctttggggtgagtgtagggcacagctggagtacagtataacacagaaacagcaagtgcactaagagcatcaaatccttccccccaaaattgtttatctcttccagactcctattcacacttattcccctgacttaattttaattctgcctcttggccctcttaccttgtccctttctaccctactcacttattctctattcatcctcattctctgaaatgatagtcaaaataatacttcatgctaaagcattttcttaaatatttccagatattccaacttgttatgatctcccacttctttaaaccagaagctattactacttttagagtgcatacctatttctgccccatatttatcacatacaacttacgtatgatttagttagcatcctcaaacttagaaaatgattctcgcagcccagcaaaaatccttactatagcagccaatcaatatctattgaaaaatacatgtaccccctcgatacaattgtcataaaagttttcagtgtgcacttaatttgataatgtcacttccatctttctgttttgaaaactgtttcgccgggcgcggtagctcatgcctgtaatcccagcactttgggaggccaaggcaggctgatcacaaggtcaggagatcgagatcatggtgaaaccccgtctctactaaaaaaaaatacaaaaaattggccaggcgtggtggcgggcgcctgtagtcccagctactcaggaggctgaggcaggagaatggcgtgaacccaggaggtggagcttgcagtgagccaaaatcacgccactgcactcaggtctgggcgacacagcgagactctgtctcaaaaaaaaaaaaaaaagaaaattgtttcataagaatgactcatccttcaaaggaaaaattcagatgaaaaggtgtctgcactatgtagtgtgttaaaatttgttctcaagcctctccagctaccctcaggagtgaacagtggcaaactgcagcttaggctagtgaagtgatctgccctacaccatcaagttagccaagaatagaagccacatttcctgactcctgccttgactcctgatctctttccacacatgcaaatacaagttcagcatcccaaacccaagatccaaaaagttcccaaaataggaaactttctgagtgtcaacatgacactcaaaggtaatgtttattgaagcattttgggtttccagatttgggatgttcaactggtaagtacagctgaccctctgtattcatggattcaatcaatcaaacagcaaaaatatttaaaaaacaatgtctgtactgaatatgtacagactttttcttctcattattccctaagcaatacagtgtaacaactatttacatagcatttacactgtattaggtgttataagtaatctagagatgacaaagcatacaggaggatgtgcataggttatacacaaatactatcccatcttatatcagggatttgagcactgtcagatttggtatccacggaagttcgtggaacaagtcatccaagaatactgaaggataactgtataatgcaaagattccaaaatccaaaacacctctggtcccaaacatttcacatcagagagactccacctgtaatggctttcagttctgtaaatcaacagcacatctagttgtgtgaatacatacgtggctaaggttcaaagtactttaaaagtattaagtccaagacaaagatgagatagtattcctcacctgatccaagggtcacacctgacagtaagaactggagtcaaaggatcatcactgtaacccatcaacataggtacagttcacaatattaggagaagtcatgaagtaacatacatacaggacacacataaatttcacctctaaccaggaatcctgtgatagaattcattaaacctattctcactcaactacccccagtggcttatgaatcaatcctaaaggcatcagacacaagactattaccattacaaatttctaatctgctaagaagtcttgagttttaaggaagaaactagtgccaattcattaaaaaggaaggcagaaaaatggaaaaccagaagtctttcattgctgctctatccccataatctaaaacaatacctaggacatcacaggaaaccaatgtctatttactaatgtctatttacctcttagcctttattaaagtgaactcatagtattgacattattttctcatcctcacagggcatttgaccacattttggaaccaagtttaaaatctttcataggccaaaaaaaaaaaaaaagtatataatgactaacatgctttaaataccatgacaaatataattaaatacttgctctcactgaattcaaaatttttagttccctcaaggtgaagttactcattttccattatttctctctaacatcaatttctccaccagatttcctccacctgtgccactactcacccatctaaatgtgcacatgtgtactcaagcattcaatgaattgcttattatgtactactcagcacgaagaagcagaggaaacccagcctttggagtgatatgaacctgactctacttcttgttttaaccaattactaagccttgtgacctcgggaagtcaatcattatgtctagtactcctgttgcctaactgtaaaaatgtgaaggattattacgtacataaaagcataataccaaaaataggcactaactgattgttagtttccgtccctctcctacaacagcaccctgactttggaaactaaccctccacgaactgaaagcattctcagaatatactgtccttaaaaaaagaggaaggaatgaagggaaagaaaagaaaagaaaaaggagagagggaagggaaaaggcaaaaatttttaaaaatacttttggtcctggtttacaggccaccacaataattcaagtaaattagcataatccagagagacaaaaactttttctattttttactacaccaaaaaagctcataataaaatttcaaagtattaaaaaataaatgaaagtaatcccttcccttcctccatcccaacccatcccatccctcagaaataatcactgttagcactctggtgtgcacatatacacatacacatacatacatatatatttttgttgccaaaattttactgcagatatctggaaaataaagagtagcataaagaagaaaaatatgtaatctatacaaccggaaaaaattttaagctgcaaataagtttccacaactaaatttacattgtaaaacacatgatggggaaaaaaaggtctttacaataaatatggtacaaggacaactgaatatccactatccacaggcaaaataaaattggattcctacctcacaccatacagaaaactaacttaaagtcgatcaaagccctacttaaatgtaagcattgaaactcctggaaaaaagcataggagtaaattcttcatgaacttgggttaggcaatgatttcttatgctgtgacacaaaaagcaaaagaaacaaaaaaaaaacataaattggactatatcaaaatttaaaacttctgtaaataataatcaagaaaatgagaatacaatccacagaatggaagaaaatatctgaaaatcatctatttgacaagacactggtctccagaatatatacaaaaaacacaattcaacaatttttaaaaaccaaataactttagaaatgagcaaaggatctccaaagaagatatacaaatgaccaattaagcacctgaaacgattatcagcatcattagccattagagaaattaaaatcaaaaccacaatgagataccacttcacattgactagcatggctataattaaaaagacaattagaagcattggcaagaatgtggagagaatggaacccacaaatatcgctcatggtaatacaaaatggtaatataaaatggaaaacaggcagttcctcaaaaagttatacacagggctactttatgtgttaaatgctgaggatgcataaaggatcagaaattcagataaagcattcccagaacagtgattgatcctgtttgtttaaaaaaaaaaaaagacaatgtactcaacaattaactaaagtacttgtatttctctttacaaaactaagttatgtaagaactaaacattttaaattgaaaattgtttatctggttctttgaactgaaaatccttttatattcccacctgtgagtgtacacaacaaggtgaagcaaatgcattaaacccagtaggtctcaggacaggaagcatttacactcagaggctatcccacagagcaaaatccacactgaagactaaatcatttcacagaaccctagatttagataaacttggagacaggagagcagctgaagagcccttctctttcctcaaggttgtctacacatctaaatcaacttcactgggggagcataggggctgcttaagggtctaagacaaataaattcttctatgcaatactttacatttatttacaaacggtctatcttacactaagctcaaaatattccactgagctactgcagaaaatctgggtgcgaaataagaaaagacaatcagagagtgtatactcataaaaggaattaaaaagaacaaaatgcccaagaatacagtatcctcacaaaaaataccctaaatgaatctagtaaaaatttggcaacccatattctggaaagatattctttacaagttaacctgtatgtcttatgcaacttccaaagtcccaaagaaagtaatacaaaattaagtggttttgagatactagtcagctttttcggaaagagggttagagaggacttacttccttgtattatgaaacaaaaaacgctctgatgaattaaaagggtagtttctttctttatttctctttttttcagacaagtctcactctgcgtgcccaggctggagtgcagtggcatgaccttggctcactgcaacctccacctaccaggttcaagcgattctccagcctcagcctcccgagcagctgggattacaggtgtgtgccatcacacctggctaatttttttgtattttagtagagccaaggtttcactatattggtaaaagggtagtttccaaaaataaaaacatgtacaaggaaatttaaaattctcctattagtgtctggaaggatgaagaatttctactattttaggttgagaaagaaagctaaaggcaaaagatcaacagacaaaaatttaaacaatttataatttctaacttatccaagtttgactccaatatttttaccaaaggataaatatctctgcttcaaagaatcataaaaacattacaacagcctggcacagtggctcatgcctgtaatcacagcactttgggaggccaaggcaggaggactgcttgagtccaggagtttgagaccagcctgggcaacagagcaaaaccccatctctacaaagaaaaaaaaattttttaataaggggggcataagggtgcactcctgtggtcccagctacttgtgaggaccacttgagtcctggaggttgaagctgcagcaagctacgactatgccactgcactctagcctgggcaacagagcaagactgcagactgtatcaaaacaaaacaaaacaaaacattacaacatatgagaatgttcaacttcactaatactttcccaatgcaaatttaagtaaagatagtattttttatttatcagtttagcaaatatttttaaaggatcctccatgctaattggagtgtggttaaacaaaaaacctgcttgttacactgctggtatgactacaactgggaaccttttggaaagcaacctaacaagatatatctgtagtcttctgaattgttcacactctcttttattcttagattcatacaatataaataaatacaaaaagcaaagcctatgtgcacaaacagcaagcatcagaaagtccatgaaaagaatagtacaagtatatagtaaaggaattaacttatactttgcttttcaaactatgttcaatccaatagatttctaaatatggcaagtttctaaaaatccaactccttaagtacactgtaaagacatttatgcacacagctaaaatatactcaaactaagaagtcctcaaaggccgtaagatacactaaaaatataatacctcccagtgaaataaagggaaaagcagaagtcaggtgagaatatttacatatatgtacccattcagcagttctgtagaagtcattatcttctttgggaggccgaggcaggtggatcacctgaagtcaggagttcaagaccagcctggccaacatggtgaaaccccgtctctactaaatacaccaaaattagccaggtgtggtggcaggcgcctataatcccagctactcagaaagctgaggcaggaaaatcgcttgaacccgcgagacagaggttgcagtgagctgagatcacgccattgtgctccagcctgggcaacaagagcaaaacttcgtctcaaaaaataaataaataaataaataaaaaggccgggcacagtggctcacgcctgtaatcccagcactttgggaggccgagacgggtagatcacgaggtcaggagattgaggccatcctggttaacacggtgaaaccctgtctctagtaaaaatacaaaaaattagccgggcgttgtggcgggcgcctgtagtcccagctactcaggaggctgaggcaggagaatggcgtgaacccaggaggcagagcttgcagtgagccgagatcacgccactgccctccagcctgggcgacagagcgagactccatctcaaaaaaaaaaaaaaaaaaaaaaaaagaagttgttatcttcccagtagaagagatgagaaaatttgaggtccagattggttgagtgatatccgaggaccacagagctagtaaaattatggagctagaacttgaagtctgattccaaatcacatgtttcctatgctaccccaaacaaagggagtattttctacagtggcattacaacagaccaagtaacagcagaggtaaaacaagtttcacatgtctgtggctctttgttttttacaagtttttattactttgtcatgggggggaaaacgaaaaattataattaggtcaaggaaagatataactatactactactatcattctgaaggaagggaaggtataccttctaagtcctgcatagtttaaaaattcccattacttgcgagaccaggtgagactgcacagttctagacttcctatcgtgtgccaaaactctagggataatcaaaaaatgtttgttgaatgaacgctaatttaaaatagaaaaagaaattccagatttcctcctcagtacaagaggcctgcaacaacaaacttctgaaataccagcagtctactaattgcatattcaaatttaaaccacagaaagttgaatcaactctgccaatttctgggactctctaaatgaactcttaatacaaaaatacatactcaggctcagcattttttctaatcatttacaaaagtaaaaggacgtcaggacaagttctggtgaaattttataaacagccatgaattgcagctgtagactgccagatacataacctgtatatgacagggggtaccacgtggaaattagagacatcccccttcaccaaaaagattatatccaggggatactacataataaaaaaaaaatctgaaaaatgtaatgggattaagatcctttagaataggctagtagtgatgattttgctttttcagtcccctcctcacaaacaaatgatgatgacactgcccttagctttctatgtgcaaagacagtattaaccttcccaggccaaacttacgactacaccttttccacacgaaatgcaaggcatttctaactccccagattacctcacattcgttggatgccacacaatagattataaagtatcaagatatatattaatttttaaaagttcaccaggagttggatattctaaactgggtttctgattcttaacagtgagaatgaagtcaagctccttatttggtggttagaggagaggatttggccagaaataattcttttaggattgacagacaagtactacttaagttctatcatctcatccaaaaacttgcttcttatattctgcttttaacccgatctacacaatgaaaagccacggagactagttttgcatgaaagcaaaggacttttctaatatgacttcagagcatgccatgctttaaagtccatgttcaaccacttactatcattttccaactcactctctatgggcccatcccatatttcaactacaggtatacctcctggccctttctatttcataagcttctttggaagacaaatctactgatttatgcaataaactttctacctctacttaaccaatttgataatttaatagctggagataattctaaattccccaaaccttaatcaagaattttggaaaaaaagagctatctagaacagttatcttcctgaaaacactgttgtgctaaactgaaacacagccttttctcaagagctaagcagctacttgggtctacattttaatgcactaaataattttataagatcatgtttgaaaccaaaaaacccaaaaaggattgtcaagctaggtcagcttacaaaaccccttctgttatgaactaggaaatcaaacaacaaaacataagctctaggaaatgagcatggaggtgctccatccatactagcttttccttgtttttttcttgagaggagtgactctctgtcacccaggctggagtgtagtgatgcaatcctggttcactccaacctccacctcctgagttcaagggattctcctgcctcagcctcccgagtagctgggattacaggcgtcgaccatgacactcagctattttttgtatttttagtagagacagggtttcaccatgttggctaggctggtctcaaattcctgacctcaagtgatcctcccaccttggccccctcaaagtgctgggattacaggtgtgagccaccgtgccagcccatactagcttttctgaagcctctttactcattcttttgttctctactctagcagctaaagacatctcctaaagaaacaactagtgtgcctccatacaacccctcagtaagcactcagtattgagactaaactgtgaaaagcactaaaataaatgcatcattcatctatgaccttctgagaataccaccacctcatatttgaatagacgtctagttttcatgagaactttcacgcactcatttgatcctctttaaaaaccacaggaaacagggcaagccatcttatcagctctatttacagagagggaaatcaatttgaaaaggttacatagcttaatcaaggtcacaaagtgactgactggccaagctggtactcagtcttatgatagtccagggctctttcctctacactgatcctaaattgaaaaaaaaaattttttttggactgctcctgcaaggtagggctaccccataggcagagagtagctgaaaaattctgtatgtgtctatcacaagaagttgaggccgggcgcggtggctcacgcctgtaatcccagcactttgggaggccgaagccggcggatcacgaggtcaggagatcgagaccatcccagctaaaacggtgaaaccccgtctctactaaaaatacaaaaaattagccgggcgtagtggcgggcgcctgtagtcccagctacttgggaggctgaggcaggagaatggcgtgaacccgggaggcggagcttgcagtgagccgagatcccgccactgcactccagcctgggcgacagagcgagactccgtctcaaaaaaaaaaaaaaaaaaaaaaaaagaagttgacaggcctaaaaggtttcacatttagatgtttctttttttggaaaaggtgaagatctggctgggcacagtggtgcacatccttaggtagttccagctacacaggaggctgaggcagaagaactgcttgagcccagcctgagcaacacagtgagactccatcactaaaaataagtaaataaataaatcacataaaaaataaaaaattttaaaagggggtaaagagccaatgaattgactaagaaatgtgttgtttcaaatcagaatgaccttgaaaagccatagtacttgcatgcaaaaatatgatccgatttaaaaagtcaatatgcttaaaatacaacagaaaaatcaaccaatatatgtatttcgtattactggtttaaaatttctgaatatgctgtaaagagaaggaggtgaaaaacgtcaaccagactggggtggtggctcatgcctgtaaacccagcactttggaaggccaaggtgggtggatcacttgagttcaggagttcacgaccagtgtgggcaaggtggcaagatcctgtctctacaaaaaatacaaaaattagccagatgtggtagcatgcgcctgtagtgccagctactcgggaggctgagatagaagaattgcttgagactaggaggcagagggtgtagtgggcagagatcataccactaacccctccagcctgggtgacagagtgagactctttaaaaaaaaaaaaaaaaaaaaaaaagagagcgagagagaaagaggcagagagagagagaaagatctcaactgataagatactacataatcacattatctcttgcttgaccaacttaacaaatatttcaaaatgtttataaaaatcaaaatgggtcagcattggaagaagttgtaagtaaaattcaggtgttctccacatgaggcaactgctgttaatagaagactatatgacggtattttctcgaagtttggtacaaagatcaaaaatagaatcacaggcaaaacccttgaaaggcttaggaatctgaatttttaagtactaggttgttgatgaatataaaatttaaagatgtgtatttagggtagaaataaccttgaccttggtagctgtggaacttgtgtggttactcgttctgggccctggttttcccaatggtaaaacagaggaggtagggacacaaacgtcctacttcatagaaaagttataagactttaaaggcgatggtttataaaaagtaattagcacacagttttgacacacactaaataataattagctactatggtggaaattttatttctatttaacacttctgacattagcaaatagtgtaccaaacagacatgctttttacatagttacatgattcttctcaacaaccgctcccccgaaagaaagcagtttttaagagggtcactctcatgatttgaagagaactgggagaggaggaacataaatcagttctgtcacattttaaggattagaatttaaacattaaaaacaattttaatatgttcacatatataactatcacctggttggaccatgacaaaaacccacccctaaccataaacaagggtaacctatcatttatcaaaaacaggaaacgttcctatctctcaagatcagcgctctgaactaattatttaacataaggtcatttttacgagttcacatgctgaatggcttacaattaaaagcctcttctaacccaaatcaccatcctccttcacttacctttttttttttttgagatgggagtctccctctgtcgcccaggctgaagtatagtggcacaatctcagatcactgcaacctctacctcctgggttcaattgattctcctgcctcagcctcctgaacagctgggtacaagcacccaccatgccttgctaatttttttttgtatttttagtagcgacagggtttaaccatgttggccaggctggtctggaacgcctgatctcaagtaatctgcccacctcggtttcccaaagtgctgggattacaagcatgaaccaccgtacctggcctgttgcttacacttaaaaaaaaaaaaaaaaattcctcccctctccctagactcctaacctaatcaagttaccaaattcaaaaaattattttatctcacccattcttgcctctttttttcttttttttttttttttgagacggagtctcgctctatcgcccaggctggagtgcagtggcatgatcttggctcactgcaagctccacctcccgggttcacgccattctcctgcctcagcctcccaagtagctgggactacaggcgcccaccactgcgcccagctgattttttgtatttttagtagagacggtgtttcacgtgttagccaggatggtctcgatctcctgaccttgtgatccgcccgtctcggcctcccaaagtgctgggattacaggcgtaagccactgcgcccagcctgcctctttttttctactagggctatcacaattctggccttcatttcatttgacaggaaggcatgggtttataccctaaccagaacaacaatgaacaggatttctgcctccactcctctaatccaggggttggcaaactttttctgtaaagggccagatggcaaatatttaggctttgcaggccacacagtctccgtctcaactacacaactcttgccattatagtactaaagcagccacagacaatattcaagtgaatgagtatgactgtgttccaataaaactttacttacaaaaacttgccttagactgcatttggcatacagggcatagtctgttgattgtgctaatccaaccaactaatatcaactttcctaaattccatcacagatcatgtgatttctgatttaaaagtcactttccttggctgggcacggtggctcacgcctgtaatgccagcactttgggaggccatggcgggtggatcacgaggtcaggagatcgagaccatcctggctagtagtagagatgatgaaaccccgtctctactaaaaatacaaaaaaaaaaaaaattagccgggtgtggtggcgggcgcctgtaatcccagctactcgggaggctgaggcaggagaatggtgtgaacccaggaggtggagcttgcagtgagctgagatcgcaccactgcaccccagcctgggcaacagtgcgagactccatctcaaaaataaataaataaataaaaaataaaagtcactttccttaccaaaaaaaaaaaaaaaatagaacttaacattccttggcctgatactcaaaggcttcctccatgagtataatcttcattaaccttggtcatttcctttttctcatactagattccaaattgtattccatgattgtggctgcttatactgctctaattccaaacctttgctcaatttgtatacagaatgtcctttcttctttccctctaaacacctacatctcccttgcttcccacactaccacctagaactaaaatccatctatcctctaagaagtctccttccctttacccagaaattcttcttcagcagaacttctatggcacttaatctgtatcttttctgacaatgattgctttgtatcttttaccacagtgaattatatcttagatcccctaagcctgtgggcagaatttatttacaagtcatctctgtatttcccacagcactttacaatcaagagataaaaaaacaggtattattgtttcaaagaaaatattcctacaactaaattcctttacataacatagcactgttaataagaccaagacacacttattctgtattaaaatgttacctaaaaactaatgacactggctcaacaaattaagccttcaaaaattagtctccatcttattacccagagggcagcatggcaaagtgggaaaaggaaaaaaggacaagattgacatcctgattctgccattgttgttaaatttctgcttccttatcttgtgaaacagatgttaccactgcctacctgggaaaactaggaataacgactacagtaaattattatgcattatggcttttataaacagaaatttaagaacagctaagttaactgcaagatccctattctgtcaaaaaaaaaaaaaaaaaacacgagtatcttgtgttcagcattatgaatataaagaataaagacatgagcagtctcataacatagacaagttcagtctactgtagatcctttcacagagaagtaatacaacatactgagtgctaaccttccagctatttctaaaaagatggaagtccaaggttatttctaaattattttaagcataaagctaaatatttaagaatgagttataactgagtttctaccaaattaaaacaacgatgcttacaacagcttacagggctcctgatctcaccttctaccactcattctatacctggatcagcatgcatgctcctgccaccccgggcttactgatgaaaatccaacaaaccgggctcagtcccatcttagggcctttgcaagtgttctctacaccttgaatgctcttcctcaagatcttcacaggtcttgctcacacacttcatacagatctcattcaaactgtcacctcctcagagaggctttccctgaccaccctattaatatagacatctctctcccataaccatcactttcaatctccttaggctctttcctttttatatctctttatagcacttgttaactagccttcggtcattatttacttatctgtcttccctagtaggataaaactccctgaaaactgtaatatcttattggctgctgtactccttgtaactaaaatcatgcctggaacacactgagtacttgatacatattaatttttaaattgatgaataacatttgtgagtgacgaggaatattcatcattgcaacttacataatttcttaaaccagctgcttacaattaaatctagcatgttgaggctactcctagaacaggggttcttaatttggggctttagggaatcattaatacccatgtttctggaaggaaaatctacagcttttctttaaatggtccctaatctgaaaaacatcctagaccagtgatttatgactctggctacatcatggaatctcctggtgaattttaaacatacagatgcttggatcccatcccagagggtgtattttttctcatctgtggtacaaccacaggacttctaaaaaattacccaggtgattctagtgtatagcaaaagttgagaaccatgcaatttgaacacaacaaatgttaactgggtgagagtcctcaaaggtacttacagtgggaagaaaacaaaaattgaaaactatgaattttgagggaattggcattgctggcaaacagatcaatacacaagttcctgaataattctgtatcataaaaacattttaaacaaaaactagtagctctacctccacttaaatactaacctgacattgagattctagagcttactcccagaacacaaataacacctttcacttaaaacaacgtatttcagacaaacattcacttcttaataacttacttataaaaacctaaaactatcaagaaaacaacagaatactttttgaagacgaatcagctatattacaactatgaagctctttgtagttttattcctaaaaatgcctttgaagcaacacatttccaccaattaatgtcctcatttagcctcaactgttacacaggatgacaggccctgaatttaggtgaaactaatactgacaatagacacaaaggggggggggggatttcagagatttatttagatcatgtcaaaagggtttgaaaagagcaggtgtcagactgacacaggtggtaaattgttttctttttgaagtcaaacaagcaaacattgagtaataagcgaattcactgataccaaccgagggtttcataagttactggtttttataccttcatccaagtagcccttttaaaaaagggattagcaagatagagagcaaaacaacaaaatgttaagtatttgtaaaataaataaatccagatgcttaaatccacagtgataaataattttaaattattcctggatacttagaatcacgatgaaactcattccatctatccctttctttctttattcttggctgtatggagatacctgctgacacagaagcaccaggtcatgagcacatctgacataaaacattacaaacttaaagcagtattttttaaaatctaaagggcttagggaagacagccatgctcctagctatgaagcctctgtggcttgacttcctggtcatatcacaaggatttttttttaaagtattattcagttcccttgttgagtaagttaatttactaggaaagtgcaaacaaagacatacatgcaggtacgcagctcatcaacgcattttagttgtggggaaagatcaggcttaggagacacgaataattataaaactattagagctggaagagccctctttaaatttcccttctagaaagatgggcacaaggaaatccttagctttctatgtcgttttactcggtaaaatagtacactcttattagtaactttatcttttatcaaaagcctgtggaaataaatgttctgggattaactagtaaatatataaataaagccacagaaacatattcccaaaatgtgggctggaaatgaaaacagaacagcatgggatacaaaaccccactggctgtttacaaaatgtttcgtgtacatgacttttatgtaataggaacagaacactagtataggaaatgaagactacatggaagggctggctacttggaggtgacggagttaaagatttcatgaaccatcaaaagaccaggtcatttatacactagattatcaaaccagaaaaagtctgagtcccctcattccattacatttgaagaaatgagaagcaccaaaaaaataaagtatcaatacaaagaagagagagaaactaagacaatctgaccctgaaggaatcgcaatgtggagggaaaacccagccctaggagttaattgtctaagtcaggtaagaaaagagtgaaaaagttgaacagcacaacagactatttcatgaacaccagatgcctcgatatgtaagggctttaaataaagagaaaacactctcctcatgagctgctgcttcagtgcctagttcttcactcaactatacccccctctaaatcagatgcagcattttgaaatcgacctcactcccttaaccacacttaatttttggagtagaggttaatgaacacaccaggataaaacgatgtctagtttggcaggagtgggagtacaaaagtaaggggaaaaagacaagaaagaacaaagcactggttcgcacacctctctccaccccagttaagctgtggaaagctgactggcatatccacatgcttaaattatacgttactggcaatgagggaagtggggaaatgctaacattctgatttgtcccttgacaaatgagggaggatattcccccctcagggttgcactttaagaatttctacttgcaatgctcactgcagcctcgacctcccaggctcaagtgatcctcccatctcagcttcccgagtagctgggactacaggtgtgaaccacaacatctagctcatttcttgtggtttattgtacagatgggcgtcaccacgttgcccaggctggtctcgaactccttgagctcaagtgatccccctgcctcagcatcccaaagcactgggattacaggcctaagccaccgtgcccgggctctcaccacaattataaaaagagagagaatgaagggaagggtagaatttcctctttaaaagtggtctgactcaccaaaccatcttcactgcaaagccttaaacagtaccagaatacaggaaaaggatattgtatgcttttcttagagctgggacaaagaaatgagagggtgtggtggggggaaggagtaaacaatcagagcataagtaacccatattatacatggtttatatgatgccatctccaggtttaatctttcccttttattattttatgattattttaatggagatggggtcttgctatgttgaccacactggcctcaaagtcctggcctcctaaagtactgggattacaaggtataagccaccacgagcagcctaatctctcaattttagtttccttaccataaaacagacacaatgcttactatacaattaaaatatgctataaaatagtaagtgaaataactatactaaaaggcattcctggcattcagaaaagttgatggtagcatcctttccccctcaaagataggtacaggaggccctaatccaatagttctcagccagggatttttttttttttttttttttttttgagatggagtcttgctctattgcccaggctgtagtgttgccatctcggctcacagcaacctccacctcccgggttcaagcgattctcctgcctcaacttcccaagtagctgggactacaggcgtgtgcgaccatgcccagctaatttttctatttttagtagagacaggatttcgccatgttggccaggctggtctcgaactcccggcctcaaatgattcgcccacctcggcctcccaaagtgctgagattacaggtgtgaaccgctgctcccagccttggggattattttgaccttaccccaacccccaaaagggcacatataataaagtctggaaaaattttgttgtctcaactagggtgagggaaggtcctactggcatttagggggtagaggccagagacgccatcaggcattcttacagtgcacagaatagcttcccatgacaaataattattagtcccaaaaggttaatggtgcctctgttaagaaaacctgcctaaaaaacattcatttttggaaaaaccacataaacacagaagaggagcataacactctagttcctacagtctattaaaaaaaaaaactatttaaaagatattacaggctaagtgcagtggctcacacctataataccaacactttgggaggctgacacaggaggattacttaagcccaggagtcttcggctgtagtaagctatgatcacgccactgcaccccaacctgggtgatagagtgaaaccctatctctcaaaagaaaacatactctaagaacaatcctttcttgtgatagctattactcaaatgacaaaagctgggggaaataccttgtaaatatcagaaaaaaacttctcctcctaagtagtttaaaaatatgcagataggcgggcacagtggctcacacttgtaatcccaacacttttgggaggccaaggtgggcggatcacctgaggtcaaaagttcaagaccagcctgaccaacatggtgaaaccccatctctactagaaatacaaaattagccgggcatggtagttcatgcctgtaatcccagccacttggaaggctgaggcaagagaatcccttgaacccaggaggcagaggttgcagtgagccgagatggcaccactgtactccagcctgggcgacagaccgagattctgtctcaaaaaaacattaacaaagaatactccagatcatccagaaagtcagtatctgatagtgtttatatggagaactcctgcactggaatgtaaactcctaaccctagatccatctcttctcaggtcttcctatcacctcagcctacagcagtcaatccttccctctaaccactccctcctcctaagatttcagcatttaatgcctgtaccatgtatctaatacttagtacacaatgcctaattcttgttttttaatttttatttaaaatactaaaacgaaacagagacggggtctcgctatgatgcctattctggtctagaactcccgggctcaagggatcctcccaaggaactcggcccacaatgtctaattctaatgcttcctcttttacttgaaagtggaggggaaggctgggagcagtggctcacacctgaaatcccagctactcaggaggctgaggcaggagaatcgcttgaaccagggaggtggaggttgcactgagctgagatcacaccactgtacgccagcctgggtgacagagtgagactctatctccaaaaaaaaaaaaaaaaatcagtcacataaattactcattgaagacaggaaccaagttttcaattcttcttaagtgttttcatcattcctgatctaaccaccagagaagtgtttccttgccctttggtggcaaggttaatcttggtgataaatgatcctgaaaggctagtctccaaataattagaaccttgaaaatgtttatatttttctctgctcggaaaattctggaaccccttttctaggactgccacaaggacacttctgactatcctcaatgatgacacattttagtttccattcagattaccaattatggtaactcccctgatcactgtttaagtactacttattaaaggaacaaacattaagctattgctcttggaaggccagcctgctaggaaacacccaagagcaattctgtaccttatccttccctaaattagtcagccaatcttaccattcaaggatgaaattaaaggcatttatctcatctagtaataccatcagtaaaccatggaagcttaaataatctaacattgctttggacattatggaaatgacaacctcagcacctaataaaatgtaaaaccaaatatatacatatcatgtcaatgtcttgaatgtacaattaccttgaaaatttcaaagtcacctcacatttctcaactcttggacctgagacctgcttactatcaagttatcattgagaacaaattaagaattctcaattgagaggtcacctgttgcactaagcaaaccgcctgcaaatactaaattagcttttctacttacactatcaagtcaaattacttctggtaatgcttgagtgtatttgcatgagatcaatttcatatacagttgggcagaagcaaaatgagtcttaagcaagcttcattctgttttcatcttacaaagaaaagactggcctgtcctcccagccttttgaataaggatcttgaaaaattcactacgcacagggtgtgcccaaagaatacttgctggaaaaatatgctgggagagtgccaatttaaaaagaaaaacattttcgcccagttggaaatctagagaaagaatagttgtagcaattcagctaaaaactctcaagacctgaagaaaattttagaaaaaccccagatctttttgttattggagtaaaattctatgaaaggcaactaaatgaatcaatgaagtattcaactatgctaattttatgcacctaaaaagcagtaactgaaattctgcctttgacatttgacggtgcaaaaagcactaagtaccttatttgttctacataaatgaactttataatctgcaatagtttttaaatcaactgtttctgggaaataatgaaagcattttattttcctttttaaaaaagcaagaataacaaaacttctttattgttttgctttttgggaggaggggttgggggaattgggataaatttttgttttccattagagacttttttttttttttttgagacagtctcgctcagtcgcccagctggagtgcggtggcacgatcgatctcggctcactgcaacatctgcctcccaggttcaagtgattcttgcacctcagccttccaagtagctgggattacgggcatgtgtcaccatgcccagccaatttttgtattttttgttttgtttgtttttgagactgagtctcgctctatcgcccaggctggagtgcagtggagcaatctcagctcactgtaacctccaccacctgggttcaagtgattctcctgcctcagcgtcccgagtagctgggattacaggtgcccgccaccacacccggttcatttttgtatttttagtagagacgaggtttcaccatgttggcaaggctggtctcaaactcctgacctcaagcgatctgcctgccttggcctcacaaagtgctgggattacaggcataagccaccacacccggccaagagacttatttctgaagcataacactccagcaatagcttgattaagctaaaaagatacccatctgttacaggcctttgtcttcagtctctcactacaacacccacccctttccaggtccactcagaaccttacgctcagatttttttttcactgcaataagtgaacacaacaaaaaattacagttactacagggacacactggtcccaggttgcctcatgagaaaagcaggtgagtaggcctgctggagctttgcactaactctatggaccctgtggaaactgcatgcaatgcaggctacatggagggtcaccgggctgctcactatacctcagcaaagcaaaaggcctgcctatgcctatgacaacagcctttcccatcacagcctggtcccaccacaaaacaacaagcaatattcttccaaaaagtacagtcctaattttaaaagtgaggaactcgagcctaggtagacaaaatgtaacaattcttaacagttgtccagaattctttctactctcttactccccttttagtactaataccacaaatgctaagaaaaataacctctagttcatccttcaagttttctggtacttgccaaatcaataaaaataacatgtgaaatgttaatcacaaaccacctactcagacactgaaatgacacaaatacagactaagtagatgaaaaccaatcaggatagtcctcaactattctttcaatatcctttcaagttctatggtaactagatttaccagcaagagttttcttgaggaaaatactaaacacaaagcacatgcttacaattcacctgtaagcacaagttaagaataatggagaaagaacataaaataccttcataactcaaaagagctccttttccagcaactggggaaatagttgtttggggcttttccacataagatataaatcatccctttcgaatgtcaaaaatgtttaatttagccatttgatggggaaaaacctttaatagttcacttctctagagtgtttattacagtaaaggaaaactatttaaacttcccaccatccctcctggtcaatgctggtgtccacccacgtactgtgtggtcagagagctgtctaaaggagttacagcaaacagcaaagctatgtgccttcaggttgctccatttctcaaaatagaatcttttttctgccctctctctatcagttccaggagttatcttctattcagaagatagaacatgtatgaccacaagcaaattatttaacatatctatagtcttgggtctcaactgtaaaacagggtatcatcatcatatggaagatttaaagacaacaaacctaaaccacctaacatacagaaaggtgtgatcaataaatactaattcctttcttttcttccttttttaaaaaaaataacttcaaccacttcctagatgttagtctgccctagcaaaatgtccctcctctacccatccaactttttttaagacaaggtctcactctgctgctcacgctggagtgcggtggtgcaatctcgactcactgcaacctctacctcccaggctcaaagcaatcctcctacctcagcctcccgtgtaagctgggactataggcgcatgccaccacgcctggctacttttttttgtagagaaggggtttcgccatgttacccaggctgctctagaactcctgggctcaagagatctgcccgccttggcctccccaagtgctggaattacaggagagaggcatcacgcccatataacccatccaacttctactccacaaaagaaaatgagtaattttcttttactcatattgtaggcttaaggatgtatctggttaagatacatatggccattatacctttcctcaaaaaatacgtattaccaaattaatgtataatagtcttctgaatataaacataaatgccattattttacatgatggttggtagacctcttttcatcaaccaaatctaatgaacaatttgattctgtttacactaaaaaagctagtgcttatgcccaggagataggtaaagagcctagattattatcttgatctcttattagctgtttgacattaagttacttaaactttccattctgcagtttgagtctgtaaaattaaaattatctatctcattgtactgttggaggattacataaattaatttgtaaaaagctctttataactaaagagctaaaaacaattcaacaaatgtgggctattatttctctaccagaatgtctcaactctgttgtctgcttaggcaaagttggttaaaaacgttgttcccagcagggcacagtggctcacacctgtaatcccagcactttgggaggccgaggtgggctgatcacgaggtcagcagatcgagaccatcctggctaacatgatgaaaccccacctctactaaaaaaaaaaaaaaaaaaaaaaaaaaatacaaaaaattagccgggtgtggtggcagacgcctgcagtcccagctacttgggaggctgaggcaggagaatggcgtgaacctggaagttggagcttgcagtgagcccaggtcatgccactgcactccagcctgggcgacagagcgagactctgtctcaaaaaaaaaaaaaccttgtttcctagctcacccaaatcagttcggtcaaaatcctcctgggttctcaggtttaagactaattcagtcccaaaggccctaaactctgccaccctgtttcttcccaggatacatctcttgtaagtacctgagaaacaaaccggaaatagcaattaaagggagagcaaggaaatggcactacatatacaagggtattcaattccctggcacatgccctctattcttttaggcctaagtaaaacaacttataagaacatgattttaaatgaactatgacacctctctctagttgccattccccaatctccccatttcccccgcccccaaaacaattttctctacaattcctcttacctgagttctgaatataatctacatgattactacaatgctactaaataggctgctagagcaaaccacaacattcacaatttaatagcaaattttcagtatattctgcttgcagagcagaccctacaactttcatcaggcttaaaataatttcaaagcaattttgtctaccatggtacaagaaacctttcttcacacttatagaaatataaaatcaaacaggacacagttgccacaaagccttaactaatgagaatcaaaactggtaagatttattcttatgtttactatatactaaacccccttggtttcaaatctatataaactcaatgttttctttacattggatatgtaagcataattttcccagatgcacaatagaaaattggagaaagataattcactggtaaacatgaaagggcatgaccttaggcatgaatttctacccagcttgcaaaataatctagtccactttggtccatgtttagggaggtggggaaatgaattaaagtaccatccatttataacagaatgtggacccatgctttcccttttctagttaaaactatttgttttatcacactgacagagcctaatcgggggctctacaaaggacactccaggtatacccaacaaaggaaaatatttaaataaaaattaatgaatgcctacctcatctgctccttctccatcttgacatatccatccaatgtagttacccctgccaaacaaaaatctgggaatcacccatggcacctcttcccttttgctcaccacatgcaatcagccacaagccctcatcacccctacttccaataaccaattctcttaaatctttcctgccaaaggctgagtccaccattcagctaactggttagcctaaattcacctctattccccttctccacacaagcggggtctgaaaaatacaaatcatgtaagccatgtcaatggcttcacaataaaaattttaactttatataatcaacaaggccatctgtatgatctggcaactagctacctctctggtctcatttctcactacttgtaaaatacactatactttgctctgttctttgagagtcaagcaccttccatttccaggaccttagcatgtcttgtttcctcaatgagcagcaaagccccttctcacccaccaattccttcttatccttcaggtctcagcttacatgtcacttccttcagaagactcaccatcacatccccatcacatgctgcctagatatatccaatatgcaccctcagatcactctgaactttgttcctgtagcacccacaacaatcataaatatatcatctatgtaattacccgcttaaatattaatctctctctaatctatattccccatgagggcaagacaaggattgtatctttcttaaccactggatccctagcatcccagcatgtagcaggcattcaatgtagagttaatgaatgaattaatcaaatccaaactcctccaatgaaggttttcaggtctctacagagcaactcctcccccatttatagaagattatttggaagcttatttcctcactgttttttattttttcagacacagggtctcactttgtcgcccatgctggagtttagtggcacaatcatagcttacccaagccttgaactcctaggctcaacccatcttcctgtctcaacttcctgagagctgggattacaggctcaagctactgcacccagccatttcctcatttttaacacttgctggaacttgtaaggaatacagaaaccttcatttttaagactctagtaaagaacctggactctcatgagctcttaagattattttgcaaactgagtactgaaatgcttctggtaaccatctattgctgtagtcagccaggcttaaaacttcaatcacctatgatgatccctcccgtcattgcccccacacatcacagttattaagtcccattcaatttacctctacatcatttctggaattatctctttttcttctcacattacatttaccatctgtacctataatactatgtcttcaacatatcccattcccatggtgccaccaaagccctatacctttcaacttgtcttctctgtgtgccctgtgctttctgcctatactgacctctcagtaggtcacaatcaaaagaaaactgtctatcaaaatctttgccaaccttcaaggttcatttctaacatcactaagtgccaggcactgttctaaacattcatctttgtcttactaagttcttcactcccttcactctttaaacttcttgaggatacaaacttagcttattcatctgttatctcttgtgtcttacacatttacttactccataagtacttattatatgactttaacactaccataaaagagtacgttcacttcagagaacaaaaacaacaatcacaaggtggcagaaaacactatagcaactatatctacggtaaatgggtaacacccaaattcctgatgcctaagttcctttcttcagaatcccacaacaagcactaagaatgattttcactacctacgtttcttctcaggaaaaaaatgagaagagaatagaagaaaaaaacacaagttcctacttctgccacttgacgtcatgtgcagattaggagaaaagccaaggggcattaaatcaaaggtgttcaacaaatgaaagtttactcagctctgaagtaaattctgtaagaatacaatgaaattattcccacatttctatcccatacatcaagaaataagataatcactttaatggactatgaaaagtaaatcaaccaaagaaatgaatgaaggcattagaagaaccaaagctttaagtcacaagtcaagaaacctgttttgtttcaacttataccagtgctttgctgggttctttgcctcagcttcccccaatgcaaaaaaatggtgatgagaatagtttcattcatgttatttaaagataaacagtcacatttcaaagtagtttgagacctaaaggtcacgtagggtcagctccctcactttaattagaaaaatggttacattagtcctatagctagtttttagcagaagaagggtttagctgagaagacttgggtatcctggctgatgttcctcccaacccaccactttatgaaatgataaagagtagaaaaatgatagccgggtgtttggtgcatgcctgtagtcccagttactcctgaggctgaggcaggaagatcacttgaacctgggaagcagagactgcaatgagctgacatcacgccactgcactccagcctgagtgacagaacaagactctctctcaaatatatacatacatacaaacatacataaaaagtaaaaaatgacaaagcaatttgattgccactttggcaacatcatctgtgtattcttaataaattcaagtaagagttacttttttttatttttatttttacttatttatttgaaatggagtctcgctctgtcgcccaggctggagtgcagtggtgcgatctcggctcactgcaagctccacctcctgggttctggccattctcctgcctcagcctcccgagtagctgggactacaggggaccgccaccacgcccggctaattttttgaatttttagtagagacggcgtttcaccgtgttagccaggatggtctcaatctcctgaactcgtgatccacccacctcagcctcccaaagtgctgggattacaggtatttttattttttttttgagacacagtttcactctgccacccaggatggagtgcagagctgagatttcagctcactgcaactcctgcctcctgggttcaagtgattctcgtgcttcaacctcccaagtagctgggattaaaggcgtgcaccaccacgcctggctaatttttgaatttttggtagagacggggtttcaccatgttggccaggctggtctccaactcctgacctcaagtgatccacccaccttggcctcccaaagtgctgggattacagacatgagccaccaagccagaccaaaagcaacaatatagaacattccaaagtatctaaaaagcaaaacctataaacacactagtaattcattttaccatgaggtcttcataaactccaagaggataaaattccccaggaggggctaggcacagtggctctcgcctgtaatcccagcacttcggtaggccaaggtgggtggattacctgaggtcgggagttctgagaccagcctgggccacatggtgaaaccccgtctctactaaaaatacaaaaattagccaggcatggtggtgggcgcctgtaatcccagcttactcaggaggctgaggcagaagaattgcttgagcctgggaggtggagattgcagtgagccgagatcatgccactgtaactctagcctgggcgacagagtgagactctgtctcaaaaaaaaaaaaaaagggctgggcacagtgacttacacctgtaatcccagcactgtgggaggccaaggcgggtagatcacctgaggtcaggagttcgagaccagcctgagcaacatggcaaaaccctgcctctactaaaagtacaaaaattagccgggcgtggtgacaggcacctgtaattccagctactcagaaggctgaggcagcagaatcacttgaacccgggagccagaggttgcagtgagccaagatcgcgccactgcactccagcctgggcaacaagagcaacattcggtctccaaaaaaaaaaaaaattcctgagggtgagaaaactcactgcaatcaagaccatccaaaattcaaataagcgctttagtgtcactgaactgcatccatagtctatttttacccaaccctgatctgaaacagacttcaggagactattagacaaaacacaggttagcataaattcaaccagaaataaaaacatgaaaatagggaaacaaaatgaagctattaaaaaggtacaagcttagctctaaatttccagatgtcaataggaaaaaagaaacctagtgaacaattacagcacccaggtaataaaaacagactaaaagcttagacaaacatacaattattcttggctgcacatctttctccctgaggtctttataaagaaggcattgcagaatacagagaatatcctcaacaatatttcagtaatcacaatgaaatgttttatgaggttatttttatactgaacttcaagataagcctagagtaacggttgggagaaaaaaaagaaaaaaaaaatttcggggacagagagaaaaaaagaaaggaaaaaaaaaaaaacttaggagagagagacctacataatgtggtccaggtacccagaacactgctgatttaagagcacaattaagagaatttctggaaaaaaaatattattttaacaagtagttactatatagaagtttataagcacaggacccagaaaatgaaaagcaaatttagcaaaatgtggaatgggtccaggaattaaacaaaattgcagggaaaaaaaaacaactctaagagggaaaaacaaagaatataaaagaaagaagagcaagcacaactcagcaagtacattacatacatatgataattaaatgcttttatttctacatctacaattaagaattaaacattaagatatttacggaagcatgcagcttccttcttaatcccataatcaaggagataaaatttaaattcctgtaccttccacagtgatgaaatatcattgtttagtgacatcatatcaaacacaacgtactgcagaattttcaaagcagttatatttccactgtaccaagaaaggaagatatgtgaaatatttcatgaaaattttccaagaagagtttaaaacaaaaagggtaagagtttttaaaccagacataaaatcagtcaaccataaaaattaatttaaaaaactctctctaaagtctcatttagcaatatagtttactgtcaagcataatacaatgataaacatacaatttgctaaacattcaacaacatagaaaaattaatcattctatagctagcatgtaccaacgacacagaatggatcactgtttctcctctgggaggtgggaaagaaaaaaacaattgaattcttagtgaagaaagggattataatttccacagaactatccacttgtaatttaagcaacatcatttaaaaacagctcattccaacagtctcctctactaaatattttcatcagggctgcctagacgaaacctagcccaccactctatcttgggcaaaagagtaaaatacagaccagctactggaagggtggggggagccaaaattcaccagctgggtcaagttcctgaagaattaactaactacattctaggattcatttctcagcatcaaagaacaactttttcttcttctttttaaattaaagcaatgcctccattctcattgtctggtcaactgctgaaaacctttaaaacactcagaagatcaacaaacacttggctaaataaataccagccttaagagtcaacccggtgatcttgctcaacaagaactttaaagtatttatgctttactggtggttttagtttaaatacaatttttttttttttttgagacggagtttcgctcgttgcctaggctggagggcaatggtgcgatctcagctcaccgcaacctccgcctctcacgttcaagcgattctcctgcctcagcctccagagcagctggatgtagaggcgtgtgccaccacgcccaactaattttgtatttttagtagagacggggtttctccatgttggtcaaactggtctcgaactctcaacctcaagtgatccgcccgcctcagcctcccaaagtgctgggtgggattacaggagtgagccaccgtgcccggccctaaatacaattacaatgtgcaaaaagagcatgtacttcagagtactttcagtacccaaatatgatctaacgcatgaaaattcaactttttaaagtatcagttgatttaattgcaagaggattcaactgatcccaaaatgtttcctaaaagccatcctttggctgttcttatacacttcacacccttccaaaccataaaccattatgtgagaagaatgctcagaactaagtagtgaatgaatggccttaaggtttttccaagtcattaaactatcctacagaataagaaaaattctcaggtacttttatttcattggtttgtaacgcttacctacaacagtaccaaaactcagaaatgttttcaatgcaacgtatcctgaaaacaatacgcttatagtgtctaggtgcttttctgttactcaaaataagtgcatgcaatttaaaatcctttaactacagtgtttattatacctctaagcacaaaatatttaacgttaaccaagatatttttaaagcggtgatttaaacagcaaagttagtggggataatgccatgaatattagcaagctgaattaagctactaatccatttaaagaaagatgggttacggaagaagcaagcctctgaagcatttgctttaaatctaaatacagaagtggacttgagcacagtgaactaacaaatgataatagaactaggtctacaaggaagaaattcagcaaaaattatccatttcttccttcaaaatagaaaaaaaaagtttcatttcagatacaatatccatgcagataatataaacaaaattgggaaaccagaaaatttacttttaaaaatcatagctgtctcaacaaccaaacactccagtgaaaatcttcatcaccttttaatacagtcaaggaaacaccaattcttcccacatattcatctttttcagccttctctagtaagccagcctctagcaaagagaaaatgaaagatctgctagtcaattatcctgcccctcttttccaactcctcatgctctctctcaaatctgatattcctaaggagataaatgcacttatttaacatgtatctttaagtatgttataatatagtactgctttatttaattaagtacatagatgctgaattgggagtgacaggaatgaaacgtctctgtctccaccatgccaatttggagtgccacccataaaaagcttatgtaaaattttctcaaaccaacagatttagaaaaaccagtaagatgaggtgggcggatcacgaggtcaggagtttgaggccagcctggtcgacacggtgaaactcagtctctacttaagaaaagaaaaaagaaaaaaattagcctgacttggtggcgggtacctgtaatcccagctacttagggaggctgaggcccgagaatcacctgaacccaggagccagaggcttcagtgagctgagatcgcactactgcactcctgcactccagcctgggcgacagagcggaactgtctcaaaacaaaacaaaacaaaaaacaacaaaaaaaacaacccagtaagaatttattccaaatacatcaatacatttaactcagcttaacaaatctgcttaaaatgggcttttttttttttttaataggaagagagtcaggttgtgaaactagactgtgcttggaggcgatgtattaaatattctgaagcattttctaattgtcagtccttaaaatgtaagaaaatctcaagtgttaaaattgaagactgggtgtgctctctgctgaaagttcaatcaaaagcaactgtaatttcctacaaaggtaactaggtcaactcagcatttgtccctgcttactggaaacaacaaaatctcaacaatcaggccattaacttatcatgtcctatatatagtttcaaaagaaatctaaattcactcttaaagaggtactagtacaattttacacataagatgtctcctagttatttttcttagacttcaaaaggaaattaccaccatttagactacaacaatacaaccctacagcaaaagtatcttccccttcttcactagcatgtatatgcactcatctacccaacatcagggaaaaaacaaacagaacctagacacctatgtacaaagaatcacattctctccataatggcgattcattcattcttccttgtgccaacatttctcaagaatgctatcatgcatgaggtctactcacaggggtacatgacgctgctcgggatcagctctggtcagttcttcctcttcaatatcagactcccctcctgaactactgtcagtgacatctgaatcaaatgcctgttcactgcacctcaagttggctatgccactagctgtaaatctctccaattcttctgaaattgaattgcttttcagaaagttgctaagtccctctgaagtggtggtctcactggcagcttttctcaaggcagcttcagcctttcgagtcagcatcaactggctccgtggtctcaaggattccaagtttggcagtttgctcaaagtcttctccaaaaatccacccagctgatgttgtatatgcctctcaacctgcttggcttgcacaacctgtaagcgcttttgtaatctgcgggcacggctctcaatgtcagcctgtcgccgcagtaaagctgttatccttgtgtcagaatctaaagcactgaaaagaatggaagacaggggagactttttaccctccaatttgacaccccccaagttagagctggagtctgtaccaggtgataatctactgcttccttgaagtgccggctgttccatggaattgacagaggatttgtttgcagtgctattattgctatacaaagttgtgtgttctacatcaaggcttctatgtggaagagtgcaattggtcataccccccttcaagtccccagattcagatcctcccatttcacccccatgaagagcagatgaagtgagagcccgttttcccccattgagggaagtggaattgtcatgatcagaatgtgttgaacttttagtcaatttcttagccaacccatttacaggtgcttgtggcagagctgtctgaccactcgtattcatggttctaagattttctaaggaaaactccaaaactggctgtctccccaacagctcagctcggagttcataggactgagataagagaggatgagatttaaggactgtctgcttgctgaagaccccttgcaacttcaaagactcctttgagggaacagatgttacatcagagcagagataagatgccaccagtggttgcagctttcccaagtcttccttggtaggattatttcggaaatctaggctgggatcctctgcagcaatggcttttcttttggttccgttggcagcaataaggatgttggcgttgccgttattttcggcactgccaggggacaaggtagaggatgggggagccagtttgaaccggatatggtgtgcttcagctgctgcgtcagtgagagcgggcgccatcgcagccattcagcacagagagacaggaagtccagcctctcccgatgccgaggccgaggccagctccacggccccttactgcctccccagagaacagactagaagagaaaggagaaaagaatattagaaatacaagcacttttaaaaacatgtatatttttaacaaaagcactacttgaggctgttgtctaaactgcctccagaaagaaaacactctggagctaactgtaccacagttattctagagacccaaatatctttcatctgggagaaagggggaggcaaaatccctgcacaagggaaggaagaattgcacccttcttgtcatttgttaccacagattgaaaggtgccaaaacacaagttcgattcagagaaaatcacagattgttaaaattaaatcatctccattaaaaaaaaatctctttaagcttgttgaaataaatggatttaaagcaagacacatcaaactaagcaataattaaacagaaaaaaattagtaaggaattcccgtgttcactaaaaaaagtatgccaaatatcacaggtctgtgcatttttctggccagggaatccagttttcatcagcttctcacttctctagaagtatagattatactacaaagctaactgtaccacatctgtaataccaacttgtttcatcagttttcttttctttcagatcaaagtggtcatcaatatcttctctactggcttcttcctctcagcctaggaatttactcaagtatcttctgccctcagtacagcctctctctcatacttaattgcccaaatatctctctttccctttaccccaaaacttctctaagaatagtataaataactgtctctgcactcttcactcttccataatctggatttcaccccctactgctctggcaaaggtgaccagtaatcttattatcaaatccaatggtcaaacctcagtccccattctatctgacttctctgaagcactggacaataccgaccttcttctaattctttcctgatgtccttgtactatcatcctcttctcttcctcctggacccttaaatgctggtgctgcacaaggtcccttctgccctcttctctctcaacaaccactagtatggtgaggtttcttaaccataagaaaaacttctgagctgcactaatcaagattcctataacctctatgttcctcaagccccctgaagctcagaattcactttctccttccagcacactattccgcatcctgtttcattaccttaagtaatgacactgcttttatttagtaaccaagctaaaaatctcagtcatttgcctctgtttgatcccccttgatctatgtggtctgggagccaaaggaaacatacgtaaagaactaagccagttgttctttaaagtgtggtctctggacttctggggatctcacaggctattttggaggttcgtgaaatcaaaggtattttcatagcaatactagaatattatctgccttttacactgtgttgacatttgcaatcagagtacaaaaacaaaggtgaacaaaactgctggtacattattagcacaaatcaaggaagaggcaccaaactatactaatagtcattatactctccactcagtttttctttttttaagggagttccacttaagatgtccttgatgaacagcaaaaattatgaattatcttgagcctttagtgcattttttaaaaatattctttgtgatgaaagggaaagtatgcataaagcactctgctgctttatgaattctcaggaaaaagcacagtacaactgagttgcaaaatgaactagagctttgttcatggaacacgatttttacttggcagaactactgacaaacattatttgaaacctgcttcactagcagacatttccttgcaaatgaacaaagtgaacctgtcacttcaaggaagaccactgacgatatttgctgccaataataaaatctgaattttttaggcaaagattagtgtttttgaaaacttgtatcaacaatcatgaacttaaacattttcccaatattttatttggtgggtgtggatgtgtgtgtgtgtgtttaacagagtcttgctctgtcgccacgctggagtgcagtggtatgatctcagctcactgtaacctctgcctcctgggttcaagtgattctcctgcctcagcctcccgtgtagctgggactacaggcacgtgccaccacgcctggctaatttttgtatttttagtagagacagggtttcaccatgttggccaggatggtcacaatctcctgacctcatgatccgcccacctcggccttccaaagtgctgggattacaggcctaagctgccacattcggactttctgaatattttaaaagccatttctgatttaacagacttgtgacgatattaatgaacgtgaatttttgattgcatataatgtaatgtgtaacatttggaagatctgcataacccagtgaacgataaaatgtccagtgaatgtcaggaaatcatgcatgggtaaaaagtttaagtgcaagacaaatcatttatttgttgctgttattttgaaacagggtctagctctgtcacccaagctagagtgcagcggcacaatcatggctcactgaagcctcaacctcctgggctcaagtgatcctcctgcatcagcctcctagtagctgggactataggtgtgtgccaccatgcccggctaattttttgaatttttgtagagatggaatttcattttgttgcccaggctgctatcaaactcccagcttcagccttccaaactcctgggattataggcataagccgccatgcccagcctgaattacttattaaatattttttaaatttctcaaagtttataagaaaaacaatttatttgctgttctcaacaaattttaagagttaaaaaagggtcctgagaccaaaatgcttgtgaaatcactggactaagcacccccctccctgccccaaatgagggcaatctccaatttaatcaaaaatgcttatctttggagcaataccaacacaggatggtaggccctacaggaccacagtaagcttctttatagtatgacaatttgaatcattaacataaaaatactcaaataaatgactgagaaaacattattcataaaagcaccaatatacatatgggtcgaatctgtcttattgctgtgtgtgtgtgtgtgtgtgtgtgtgtgtgtgtgtgtgtgtgtgtgtgtgtgtttctgagatgtagtctcgctctgtcgcccaggctggagtgcagtggcgtgatctcggctcactgcaacctccgcctcctgtgttggagtgattctcctgcttcagcctcccgagtagctgggacttcaggcatgtgtcaccatgcccagataatttttgtatttttaatggagatggagtttcaccacgttggccaagctggtctcaaactcctgacctcaggtgatccgcttgcctcagcatcccaaagtgctaggattacaggtgtgatccactgtgcctggcctcatataattattaacaccaaaagtttcttgttccagggttgtattttaaccaacactctttatgaactagattttcagggcttatgtagttttctcctgtgggctttctggcatatggcattctgtgtggcacaaattattctatgttgtcttttcccatttctaactttaaatataatactaattactaatatattattaaacattgtgttacagaccagttgacagtactaattcctgttattaaacattgtgttatagaccagttgacagctggaccaatatagttgttaaaaatattttgagtcacttttataatatgcaaagggtttttcccatggacaaacgaaaatcactaccagataattcccatcaattcaatctcctccccttttgaatgtcaatatgtagttgatatgagcaatgcaaggaggcatattatcagtgccagatgattaatacaacatgtgaagagtaattgtaccctactgcctgacagcactacagtaagacttagcaagggcaggaaacagcttccctctgaggacccaagcaagggcacaaatatgctttatgacttacataaaacttaggaaaacccaggctcactccagcacaaatgaaaaagagggtcataattaacatcacatcacagaaggtgcttaagtagtaaacttctcaaagttattctgagattattcaattctttaaagcttacaactttaagaaaaaatgccggcttaaatcccatctactccagctgggcacagtggctcacgcctgtaatcccagcattttgggaggccgaggcaggcgtatcacctgaggtcaggagttcaagaccagcctggtcaacatggtgaaaccctgtctctactaaaaatacaaaaatcagctgagtgtggcggcgagcgcctgtaatcccagctacctgggaggctgagacatgagaatcacctgaacccaggcagcagaggttgcaattagccaagattgcaccactgcactccagccggggcaacaagagcaagactccatcttaaaaaaaaaaaaaaaaatcccatctactccaagacttctctgaaatgatgtctatgaacttgacattaacatatacacttcaaagacaatagtttatttgatttgcactttatccttggtctcaatatccccataggatacacagcatagtgtagttactaaaacaatcatctaagtaagggggtgggggaggagagagagtgcagagaacaggaaaaagtgaccactttttccgaaaaaattcccattcctaattcctaaatcttgagatttctataccaaagaaataccatttattgacttgacatacctttattgactcgaaatactatgctaagattcaacattactcccaaagatattcataagtaagaggagcactgactcaagtgagcaaatctcagttcccatcctggctccacctcctgtaggttacttaactattctgttctttaagtctcctcatctacaagtaacagagccttcccgacaaggatgctatgatgatgaaataagatactttcaattacttggccacgtacctggagcaaccacccagtattatttgcacttttattacactggaaacaaaaaggaaacatagaaggaatgaatttccatggctttttaatgcacctagtttgcaattagctacaattgccataaaccaccacctaagtttagtactttaatcttttccctgttatgtctagacttacttttaatatttcatgatgttgtttataataaaaagaaaactgaatgccaaaaactcggttaaattattaaatatccatacaatggaatactgtgcaaccctaagtgtggcagagctatatttactaacatagaaaagtgcttgcttcattattaaatgaaaaaaagttacaaaacaaaacacagtatcatctcaattttgctttaaaaagtcattggttaagattcttttgtcttttgtttcttggcttatgtaaagtctccaccataaacatgtattacttctataataaaatggagagaaacaaaaagaaaacaatggaaattcttaaagagccaataactaagtaaaacaaaatcacagtaacattctttttttttttttaagagatggagtctcgctctgtcacccaggctggagagcagtggcgtgatctaagctcactgcaagctccacctcccgggttcacgccattctcctgcctcagcctccccagtagctggaactacaggcgtccgccaccacgcccagctagttttttgtatttttagtagagacagggtttcaccatgttagccaggatggtctccatctcctgacctcgtgatctgcccaccttggcctcccaaagtgctgggattacaggcatgagccaccacgcccggcccatagtaacattcttaaatttaatatacagagcaaaacaatgattcctatcccacttgacccctacaaaattcaaaaagcttcaatctttgacaatgtaaagcagggaaagactgtcaaatttaagcagttcttagagaagctcagggctaaaggaaaaaaaaacgaaaaacaaaaaaaggaagcagttctacacaaacagcacaacagcctatctgataaatcatctttctccaaagaatacaaagccttaaaagctataattaactgattaatcctcataacaacctgggcagtagaattagggctgagattataatttctaatttaccggtggggataaagtcagactgtacattcagaataaaaattcaagccccaaatatcccaatttttagttcattcagttagtaaactataatctgacaaatacagatggagctgctacacctgctgtcactcacacaaattgagattctgcagtaagcttgtacagataaaagaaaaggctacctattcaaggtcatttagctataaaaggttgggctagataatcaatagtttctctctcagtttcaaagaagtattttagggtctggaagatgttaaatgcactcagcaagcaaatacatttcggaaaaacttcccagatggagactcacaacgtattgcatcatactgaatatgcaaatgtttacctttaccaaacttttttaacaagcacctttttccattacatctattaatatcaagcagaaacatcattgtgagaaatacaagttgggataaagttcaaatatgtgacctctagggtcccttcctatgttaattctattattctaaattgcaccatcggtccaaggacaaacttctacctaacacaagtggcacttgggaagcaaaaatatacttctaggatagagtttctcaacctaaccactaactgacatctcacgatgagtaatctatcacagggggctatcctggcagtagcatgtttagcaacatctctgttttccacccactagatgctagtagtgcccttctgaaaattatgacaatcaaaaatgtctccagacatgtcaaatatgggagctggggggttcaacatcacacctcccaacagagaaccatatcctaaagattatacacacacatatatatactctttcaaaagcaaaacgtatccagctgcttcaaatactgtaagtcagaactaactccacacccacaaatgaaaacctcatttattcccagtcaatttccaagacaagactccagatacacaagaataacctggaagcatccaccttgcaaaaatatttagctgcagagaacaaaggggaaggaataggtcatccaggtggccaacaagtattacaaccacacttgcactgaaagcaaaagcaaaaatcagatggggaagaaaagtttgcccataatgtggcttctactaacctcttccttcaccattacctcatttctctacacaaaggacggaaagaaacagcaggaaggatgattagggaagtgtccatgaagttgccgcaattttagctgagacttgaaaattagctaaaatgtcattatgcaaaaggctaggacaagagaatggtaatgtggcattctagtgagaggaaatggcataagaaaaggcaacgctgtgtgggaaaaggcgacattctgaaggttaaaagaaatgaacaatttgggccgggcgcagtgactcatgcctataatcccaggactttgggaggctgaggcgggtagatcacctgagatcaggagaccagcctggccaacatggcgaaaccccatctctactaaaattaccaaaaattagccgggtgtggaggcgcgcacctgtactcccagctacttggaagactgagacaggataattgcttgaacccaggaggcagaggttgcagtgagctgagatcgggccactgcactccagcttgggtaacaagagcgagactccatcttaaaaaaaaaaaaaaattaacaatttgcttaaaacacaaagcatattttaatagaggaaatagtagaatgaaggtggaaaggcagtttgaagccagatccttaacggacagcctttaatagccttaattcagacttaaagacagtagaggggccaggcacagtggctcacgcctgcaatccccgcactttgggaggctgaggcgggtggatcacctgaggtcaggagtttgaaaccagcctggccaacgtggtgaaaacccgcctctaataaaaatacaaaaaaatcagctgggtgtggtggcgggcacctgtaatcccagctgctcgggaagctgtggtaggagaatcgctgaaacctgagcggcagaggttgcagtgagccgagatcgcaccattgcactccagcctgggtgacaaaagtgagactccatctcaaaaaaagaaataaataataaaaataaaaataaaaaatttagccgggcatgatggcaggtgcctgtagtcccagctactagggaggctgaggcatgagaatcacttgaacccaggaggcagaggctgcaatgagctaagattgagccactgcatttcagccagggcgacaaagagaggctctgtctcaaaaacaaaaacaaacaaacaaagacagcagaggccaggtgcagcggctcagacatgtaatcccagcactctgggaggccaaggcaaaaggattgcttgaggccaggagtttgagaccagcctggtcaacatagcgagatcgagtctctgaaaaataaaaagtatatacatatatatatacacacacatatatatgtatatgtatatataaaataatgacagcagagtatcattaaacactttttaaatgggagtgaaacatcagactgtgctttagagagatcagttgggtaggatggattgaaagtaagtaaaaaggcatctatagatggcaaagaccaataaaaaagctaccacaataatccagataggatgcaatgagaacttcaaccagaaaataatagtcaaagtctctaccaaagcttaaatccagaaatgtgaaggggccagtctaacaaaaaggccaaatatatgacaaacaaaaacatgatggcttataaagaatggaaagaaagctctcttttccttcataatttcatctcctttgtgacgaaatccttcttttctcacgaagcttttcaggtttggtatgtcctctctatacttctaacactatcagtctagcccaggtcctcatcagctcctgtctagattatcacaacagcttcctgactagtgcctcagtgccccaaactatcctttacctttttatcatctcactttcctactctgaacaagttcctcacactttttttttttttgagacaaagtctcgctcttgtcccccaggctggagtgcgatggcgcgatctccgctcactgcaacctccgcctcccaggttcaaacgattctcctaccacaacctcccgagcagctgggattaccggtgcctgccaccacagccagctaatttttttgtaattttagtagagatggggtttcaccacgttggccaggctggtttcgaactcctgacctcaggtgatcgacccgcctcggcctcccaaagtgctggaattacaggcatgagccaccacacccagcccctcacacctttttaatgagttcaaattcttcaagatgaaacttaacgtcagggcaagcacatcaattgatacggacccagaactccccacagattcccaactccgtatctttgcctatgttgctacctctacctggaaggtccttcttctactttttttttttgtccccaaacttactaatttttcaatacatagcatctccacaaaaacttcttagactcttccaattcatatcactttcttcctgcttgaattgtataatgcacttaaagtcactgtcattcagttcaaattatctgaattttccctaattgttaactaattctatttccaagacaagcaaaattccttaacagcacccttctttagcgtgctaactttatcgagagcttggtacatagtaagtgctgtaagccctaaatgactggactagagaagtcaaaaaggcctcgtgggggttgccctcaagtgtaagattttactaagaagagaaaaaggaggaaacacgaatcaaaaaattgacacaatcaaaataatgggaaagacgtggggcatgatccacaaaacaacttgcatgaatcaggtggtatatgtacagcttctcaagagaaagagaggaaaagaacagtgatttgtgatgaagtactgcaagctacattatggaatgcactgcaaagtatttattttacatatgaacaaaagtagatttgttgtggaatacaatggggaaggagagacaaaatttttactataaaacaaagagataatgtgtgtcacccacaagaccattatcaatttccttggccaacagggcttcttaactgaaaaagctttatattactaaaggaatcattcctgagtgcaggataggttattacaaatgttgttcactaacattaattagcgttttactatgtcaatcactatgctaagtatcttacatatattctcttaatcttcacaataacaatgtaaggtaagtactactgtcctcattttatagatgctcaaagaagttaagtaatttgcccatgatcacacaactatgaagttgcaggggcaggatccataatgctaaagccgatgcttttaactactacactagatagtttaaggcttaaactgaaacggtcttaactgcctgacagtaaattctgaattttagtctttagaggaaagtcagtcaaagaacaccaactacctactgagtatctccaataaatattaaaatgcctagagtattcaaagcaccacagtaagtacatacaaggatgacaagcagcagtaaagagagacactactgtgtgatttgggggatggaggcaatcctcatacaggctgagaagtaggcggagtcagaaaatgcttttcagaaaaaagaacatccaggctgaaacctaaagaatgagtaggagctgggtgcagtggcaggcgcctgtatttccagttactcaggaggcaggaggatggcttcaggcaaggagttcaaggccagcctaggcaacatagcccccatctaaaaaagccacccaaacaaaaacactaattttttttttttaaatgatggcctaccatggtagctcacacttataagcccagcaccttgggaggccaaggcaggaggatcgcctgagcccaggaggagtttgagactagcctagacaacacactgagacccagtctctaaaaaaataataattagctgggcatagtgggagggtcacttgagcctggcgggtggaggtcgcagtgagctgttatcacgccactgcactccagcctgggttacagagcaagattctgtctcaaaagaaggaaaagaggagaggggaggagagaggagagaggagagaggagacaggggagaggggagaggaggtgagagaagaaaaggagggaaagaaggaaggagggagggaaggaagggaaggagtagggccgggagaggtggctcacgcctgtaattccagcactttgggaggccaaggcaggaagatcacttgaggtcaggagtttgagaccagcctggccaacacagcgaaaccccgtctttgcctgtaatcccagctattcagaaggctgaggtacaagaatcacctgaatctgggaggcagcggctgcagtgagctgagatggcaccactgcactccagcgtaggcgacagaatgagactgtctccaaaaaaacaaaaagaaagaaatgagtagaattcagcattgcctatacaactacttcaagcatcccatattcaaaacccattccctgccccaacaccaaatccaaaacttcctcctgctcctcaacattgtctatttgagttaatcatgacctcaaatcaccaacttactttttaccataaatatttaatttaaacatctactaaatgccagatacaagatagtaaaatataaattaggtgtgaaggtagcctagcttgataaagtactgtatttcacctgaaggggtcaaggaaggcttctagaaaagatgacatactgactgaattttgaaaggtgaggtggtgcacagagggtgagggttggcaacacacagaatgacaggcacattcattccatccttggtgccaatgccctagtgcagaacctcattatgtactatagtaattcaggcagtaataatctcccaactattcttccttcttcctgtctcagcaagcctctaatctagcgtccactaccaaaatgattattagaaagggaagaaaaaaggaaaggagggggtaaacctaaatctaaccatttaaaatctttcactgactctagagtaaggatgagtccaaattccccacacaccattatctgtcccctttttacattagacctcatctccagcctgtcctcactgcagccacctgaaacatatgtttcctggctcttctatgcccctgcacctttactcatgctactctttcacggttcagctcaaggttacatgctctttcaagtattccccattactcccaggttgaggtggggtccctccctctaggctcttacctgcacccccatgacaccctggctattgctcatggtacaatataaactcacaattttgtcttgtctctttcttccccagagtatgtacttttttttttttttttttttgaaacagagcctctcattgtcacccgggctggagtgcagcggcacaatattggctcactgcaacctccacctcctgagttcaagcgtttctcctgcctcagcctcctgagtagctgggattacaggcacccgccaccacatctagctaattttttgtcttttttagtagagacagggttccaccatgttggcctggcctgacctcgtgattcgccagcctcggcctcccaaagtgctgagattacaggcatgagccgccacgcctggccaactatgtacttcttaaaaaaggagggttatagcttgttttatctctgtcccctacaagcagcacaatgcctggcagacagcagaccaacacacgttaagcaacctgagcattctatgctaaacccatcagatgaagatccattaggacgttaatggggatgtctgaagtgatcaaccacctaacaagaagaggcatcaactgaacctaggataggcttcacccactacaagttccagttatttacttgaccaagcacctgtacccagactaggaaactttttaactacactttttaagctattattaaatgtggttacacagcattataaaggtaatagccatcaaaatcacaaatgtaattgctcaaacttttacccagcaactgcacttctagaaatctattcaacagaaatattctcataggtactcaaagatgtatacacaatgctttcactgaagaactggaatacaaaaaaaaaaccctaattaaaaagatcaagccatataacaagtatgatcccattaaacatatatatatacacatatatatacacacacatatatacacacacacacacacacacacacacacacacacacacacacggataggctaggccccatggctcatgcctgtaataccagctactctagaagtcaaggtgggaggactgcttgagcccaggaattcaagaccagcctagacaacatagcaagataccatctcaagaaaacttttttttctgaaggatgtctatatatcaaactattaatggtgttaatcctacttctatgctagcactgaattcaaatttcctaccactctttagctgacaaaagacagaggaaaaaaaaatcatactttttatcatatctctttccaacaagccctaatggttggtgtaagtgctcctgaacaatcctaaaatcagcgacttctggaagattttaagaattctaaaggaggccgggcgcggtggctcatgcctgtaataccagcactttgggaggccgagacgggtggatcacaaggtcaggagatcgagaccatcctggctaacacagtgaaaccccgtctctactaaaatgcaaaaaaaaaaaaaaattagctgagcatgatggcgggcacctgtagttccagctactcgggaggctgaggcaggagaatggcatgaacccaggaggcagagcttgcagtgagctgagatcccgccactgcacctccagcctggggcacagagcgagactgtgtctcaaaaaaaaaaaaaaagaattctaaaggaaacaggttattctgggagggtccatggccaaattcctgagttcccactgaaacctaccttatacctttagagaaaagtcaattaatgacttttaaaagtacatttttccaatgccaataaaatgttaagtcaatactaatatccatttttcattctcttgggaggcaaggggtaaggagtaaatcactaagtgcaaaaaaatacagtccaattttttggagacatgcttaaggtcttcaaagagcttcagttctccatggtaacatatggagagtttaatgaaactttcctgacagttcaacttatcagactggtatttcttttttcttttttttgagacgaagtctctctctgtcgcccaggctggagtgcagtggtgcgatctcggctcactacaacctccgcctccaggttcaagcaattctcctgcctcagcctcttgagtagctgggactacaggcatgcgccaccatgtccagctaatttttgctgtttttttttttagtagagacagggtttcaccatgttaagccaggctggtctcaaactcctgacctcaggtgatccgcctcggcctcccaaggtgctgggattacaggcatgagccaccacacccagcccaggctggtatttctatgaagtgtctctcctatactagaaaccagaaactagctacagtacttagctttgagcctctttcccttcacaccctctggtggaggtgctaacaaacagtcacaaaggccaaataacaagcagcaagaggaaagtctagatatgagttcttagcaatttttggtttaacatcctaacaacaaaattgttattcctcttttttattccctaatacttaccttccaactgaatttaaccaagtctaaccttaagctctcccctttttaaaaaggaattaaaaggtgagggactccattaagtttgatgtcactcaagcaactttttccaaataagagcagaatctgctgtaattaaaattcagagtaagatctcattttggattcctggttcaggttacaagaaccagagtttttaaaataacatttagataaaactgcactcaatctacctccactttgcatttcctgaccctcaaaatcttggaaagaaactttaattctaaaaaaattacagccaggaaaaaaaagggtaagttcacagtcagcaacaataaaatacacagctaaataatttcctggtagagggctttcaaatgttaacactgtggaagcagcttaaaatcttggaaaagcaaggcttgcagaaagtaacatttattaaacaactattttgccgcattgtgctactaaatggggaaggtctactctatttaaaaggtctcttccaccttaaagggactctttgcataaaggtttaaaatcttcatataaaatgtttgatttttttctttcagactgcccaaactcatttgtttttgattcataaacatgagctgtgttttctactttggtcaagtcagtttccgcactctattttagctttacctttattctaccaaagacaagaaaatgcttaataaaaaaaaatatatattgcagctctttttggagtccaagtattttggtaaatcacaccttttggcttattttctcctatgtattttgttctacatcctaaaaggcacatggcttaaaaaagaaacaaataataatagttaccccctgccatactagtcatctcctatgacccacaatcctcccctcaatctgcaagtgacacccaaggatatcacttacctcctatatcttctgatagccttcaaacgctggtgaactctagtacagtggatatttgtcttttctaattcatactgtcttctacagccatagtgtggttcaactgagttttgatctcacatttcagggaatgggaagtactgatgagggaaacttatcttgtcatataaactattgttctgcacaacttttagtatgcccagaggtatatacgcaacttatcagcatagaaactgtaatttaaacatacatcttcagaagcaacatgagaactaaaaaagtcttaaaacagacttccaagaaacagttatgaagtccaattttaggaaaaagacatgatccaagtgttctttgcactgacacagtaggcaagccaggtgtctggggccattttacttaagaacctgccctgtactcctttcttaaggtaagtaagtaaagaggcactaaggtaaaatacgcttcccaagacatagactaatcaaatcactcaaggcaggaacatttaaaatgaagaaagagtacaacgaaagctgctttaaaactctaaataagacaagcaaggggccaggcccggtggctcacgcttataatcctagcactttgggaggctgaggtgggtggatcacctgaggtccggagttcaacaccagcctggccaacatggcaaaaccccatctatactaaaaatagaaaaaaattagccaggcgtggtggtgggcacctgtaatgccagctacgcaggaggctgaggtaggagaatcgctagaaccctaggggtggaggttgcagtgagccaagatcgcgccactgcactccagcctgggcaacagagcaaagattgtctcaaaaaaaaaaaaaaaaaaaaaaaaaaaaaaaaaaagacaagcaaggttatatgctcccgttgctcaacctactcaggaggctaaggcaggaagatcacttgagccccggagttcaggcactctaaactgtagcgcacaatgattacatctgtgcacgccaacctgggaatcacagcgagaccccgagacctcgtctctaaaatgaaaaagaaacaaaatctctaaaccactcaataagatttactctggggcaatcaacagacaaccacttattcagtttaccctagtccctcccctctaaactcaaggaatggaacggagaggtcctttgttggggggtggagagggacaataaaactatatacatctatctagcaagaaagtcgcttatttctgtgtcttaatggactcaccaagaagaaaaaaatagcccctacccatctccccacaagctgaaaaaacataaaaggaatacgcattactctttaaacatggcgtttactatgtttagaaaatccagtgtggattagtttggtgttttatagcacattttaaaaattgcttgtctaggctaagcgtagtggttcatgcctgtaattccggcacttctgggaggccgaggcaggtggatcacttgaggtcaggagttcgagaccagcctggccaacatggtgaaacccccgtctctactaaaaatacaaaacttagctgggcatggtggcacacgcctgtagtcccaatggcacatgcctgtagtccctgctacccaggcggctgaggcacgagaatcgcttgaacctgggaggcggagactgcaatgagctgagatagcaccactgcactccagcatgggcgacagaacgagaccctgcctcaaaaaaaaaaaaaaaaaaaattgcttgcctgatataacaaggtaactaagctttactcgcaaaggggcctaatcagaacctctcaatactaaaataccttctcaaacaaccacaacacccctatgtttacagagtacacaaatcaggtcataacgaacagaacaaacctaaaacttcttattcactttaaaatgcaattaaaacctgtggtcaactcaatcctctacagaagacgcagagacactggttacaatgtagcattactagagatggaagagtagccttagtgacagtgaagaaaaaagtttagtatagttacttcactttcttctcaccttgatatgagttcacaagtgaactaaggcctactcattttctaacttccagaattttcctcaacaggaaacactcacgtaacaaagagtgctctgcaggtttaaccagagaaataacatgtgtaggcaggaagaaagaaaatcagacaaaaatttaacatctcacgttggtaaagcaccaaagtcaaatacgaatgttctgaacgtggctttcagaaaagatgcaagaaaacttctaaaatacttcacttcagtggactcatatagatggaaagaccgaaaatcccaccctaccataaaggctctaataattcttaactgatcattcttttaactggtcacaatcacagacactggtatatactcaaatgaggtggccatcagtgacaaccatcttcaccataatatagacattaagaacctttgtaacatttaatgtttccctccaagtagttcaaaaaataaaaagtcaatcacctcaaattatgaggtactaacaaatacaccaaatatgctaaaggtcgaaggaacggcacactttgttgcataaacctagtggaaatccaattcagaatttcatgactgaaggtagttattccacatttataatacattttttaaattcccaagggatgagcatttttaccttgccttatttttagaactacacatcacactgcacatatcacatgacatgatgtaactgttagcaaagaaaatggtccaaaccattgacaatgtacatggtaaatcaggatcaatgcatactcaagaaccacatttcgtatttactttaaaaaaaaagtttcttaattcaaaatgttttttcaaattgaaaaaatgtctagtaacctatgtagaaaaaaccagaaatgtacttcgtattttataaaataggagtttacccaattatgggaaaaactgatataaagaaacagataaaggaataacatacttctaaaactacaggattaaaagtaaaaattttctagatcaacaccgaaatgctaataaatacacttagcattaggcacaaaacaattactactcaaaagtattcactgttgataggttaaaaaaatagttttaactgacaacgcctgtagacaattgaaattttctaaattggtcagacagcatgctagaaaaggaaccaagtagagcctataggaaaggggaaagggaaaacacacccacttaagcctttgtaaatagtggtcctttaactgacccaaaaagcagagaaaacagaaattacagaccatcctgacaaatggaaaacatattctaacgtactagtttccatacttgaaaggactttcaaaatgaagttcagtagcaatctataactatatcatgattatgcaaggcaaagattatgtaattttatcgtttattttaaaatgttctccgactctaaaactaaaacaagtaaaacgttttgatctctccaaagcgaaaaggaaaggttcctctgagctgcaatttaaaaatataaacacacaccccaaaacaaacaaaaaaacacaatgattgctagccacgtgacaaaggagatggcaacaccaggattgtgaatggaggggagggaggcgaggctggaggaagagagatttctcggaactttggggaccgcggcagtcggtctgccgaccctaggagcactaaactccagcccctacgagttgtgcttctaacaccctcaagtacagttttattaataagtcacagaaaatgctccagtgacctccaggataaaggggggtgggggggaccgaggaaaaggaaagagagcaatttaaagtggcgccatcatgtcaccccttctcccctaaagcaatcagtaagcaatagttaagtagcacgtttctctataaatccacattgggattccaacattggaaaacgaggatttttaagtaagacacgggagtagcgctgtttatcgtatggaaaacaaactatttgctaagaatcaaaagaccgtcagccggaaaacaggcccccaaaaaggcagttaagattccaactcacttaaaagcaaataaatccctcttcctctttagtttaaaaaaaaaaaaagtccgcctgagggagactacatctgaaaacgtaagtgacctgaatttacaggcaacaaaaataataaatgaaacaatcagagttgtgatacaaaccgtgcaacgcgccaagatgtgtgtttcgagcagagaaaggccttttgcagtcaagagaagttcaaggcgagagccagagtttgtttggggggttcttttacgggaataaatcatgttcttcaggccgcctttttaaatagaacgccaaaggaaaagctggcgaacgaggcggcagctcctggggaagggcccccgcacacccccgcccttggggcgactcccagcccggacccgcagcagggaagcccggagaggccatttaaagttccgggggatttttctaccctgccctgcctttctagttacaactaacaaagagagagagaaatgggagccacagggagagcgaggagaaggagaaagggcagcaggaggaggaggagaggagcagcagcagcacctaccacgtgatggaggagcgtagcccgggcggattcagccccacaaaatgggcgcagtttgcaaacagccccccggcctgggcgccgagggccagcggcgggcgggggcgcgcgacggcggctccggcccgggcccgccgctctcctccccccgacgcccggagccgccctgactttccgggcgggggggcgaggcagagggggaggggaaggcggcggcggggagcggctgctttttcttctctttcgggccctttcccggccttgctccgcaccgacggggcccgagcacggctggagaccgcagcccggccgggagggcgggcgggcgggggcagagagtgaaaccgcccccccgccccgcacaaacaagcaccgccgtctgcagcccgaacccgcacccaggccgccacccccggccgcctctttccagccggggagcgcgcttcagccgccccccgcgccgccgcggcgagacgagtcggcttcgctacggtgctcggttctcccgccggctcggcgagcggtggcggcggtggcggcggcactgggaaaatggcggccgagctccttttccctccccccctttaatctgaagcggagggagaatggagcgagcgagcaagcgggcgagcgccggggacacggggaggagggacagcagcgcctccgccggctgcggctgcggcggcgaagggccgctccaccccggcgcgccgccagggggcgcccgccgcgccgcccccgcgggccgccaggaggcgcggccgccgccgcctcagtcatggctcctcgccgtggccgatgtttttgtacctccatctgcggaggccgcggcgcccggccccagctgccccggacgtgcggcgacggcacgcagcactgcggcagggggaagccagccctcgctgcggccgaggtgagtctaacctgaggcactgacgccgtcacatgccctccgtgctggggccggcggtgcggctcgccagttgaggggcagggcgggccggcgccgcggagcgagaggacgtgagcgaggaactgtttgcactgtgtagtaaagagggtaaggccgtcggcaccacactattccaaggctaaccctgcagaaagctccctgaccagtgaagcggcttccgccgcccgccctttgtccctagcagccagcctccgtatactgcagcacggctgggcactagccccagcaccgcgctccgcagccaccagagttgggcggggtggggagggtgcacgtagtcactgcgcaggccccagccagggcccgcgccgggccagcccgggaagggacagccgggagccagaggggaagtgatggccccgccggcgccgggcccgctgggaactgtagttttcgtgaagaaacacgcgtcttgttttgggtgtcatggcttggcagatccgccaaaacaggcaaatggcattacacaatgagtatttatgcttcctgccgccaccaaaaggaagttcactgccatgctaaaagtttaacaaagaactccataaagaaacacaagtctcacaacaaaaagccaacttcccacctcgttaccagagttggtttaaagtggtggcaccttatcatttctcatgaccagtttatcagtacagaactttatattgtccccaaaataggacctttaaaataatggaacctttcctagacttaaagaattcataaacataatgtaatacaaagtgtcacacaaagtgtaattctaccaccctttaaagttgccaaaagatgagtggagtatcttgagatttaaaagactaatctaggattcatcaaaactggcttaaatgactgaagaaaaaatcgttcaaatcattaaatcatcaaattcggcagataagaagggtatgtatgctctactaccaaaaaggaagacgcaaaatgcttcacacttttttgtggcttaccagaaccaatatccggcattatacgtcacttctgcttatcaaaaaacaccctcacagtcgttacagaacggttttagtcttcccacaaagttacactaactcacctgcccctgcaacatctgcacctaggtttctgcgaatttccatttgtactcctaaaatcacactctcaagcatagtcatagttctcaaataccaaaggcaggcagtttggagtcatagggtcaaattacacaaagaataaactaatatttgtatacacatccaaaagaggtctttagtcttggatttttaatttacaaccctggggaaaaactttgacttttttattgtacacacatacacacataaatagtaattccacaaaatacagtagaagggtattggaccaacagatggcgaactagagccccaatctgaggctcctgaaatctaaattagcagaatgaaaaataccaaataaggcaaagccctttgcagcgtatacttaaatattaaattcagacacaccataacaaaataatcttactgctgctccaaatttttaagactgaactgtcagatttaattaggcaaccaaataagcaagattatatgaaatatatttttctaatggattaggagaaaactggaaaatgctcatttttaaaaccatgtatttgggggaactataaattccagtttcccctttctctcattgcttagtgcaagagtcaagagttcacagggtttatggcacttaaatcagtcaacctgttgtatattcttatctaaaatcagacatctttcttattaggcatccacttgtacttttatttttttgacagggtcctgctcggttgcccaggctagagtgcagtggtgcaatcaaactcactgcagcctcccaggctcaggcgatcctacctcagcctcttgagtagctggcactacaggcatatgccaccatgcccagctgttatttttttcactcctttttgttttggtagatacagagtctccctatgttgcccaggctggtctcgaactcctggactcgagtgctggcattacaggcatgagccaccacacaaaaatcttatgaagagaaacaaattttcttaaatttccccccaaaaaatagtggatgtccaaaaggctgattgaaaacacctacatacaaaataaaacaaacaaacaaaaaaagatttaaagaaaaaggcctggtgcagcagctcactcctgtaatcccagcactttgggagggtgaggtgggaggatcacttgagctccggagttagagaccagcctgggcaacagagtgagaccctatctctacaaacaaaattttaaattagccaagtgtggtagcatgtgcttacagtcccagctactccagaagctgaggggattgcttgagcctgggaggtcaaggctgcagtgagtcatgatcatgccattgtagtccaacctgggcaacagagcgagaccatctcaaaatgaaaagtgataaaaaaataaaaacaccaacatatttcaaatcactcttggaatagtcatgttgactctccaatatccactctattctgattagttttaacccattctctttgccaatgattggttaggaatggccatgagatgtgagtagaagccccctggacagcctccaaaagagaactgtgagaaaaggttcttcaatcctaaaaatgatggaggaaaaaacagtccctcttcctcagacagtgacacctcaaactgctacagtcacctttgcagcaagcctgaagatgccaccaacatcaaagggaatagagagttggtccttggtgatagcattaagccactgtatcaaccaatcctgacaatttgtatgacttctggatttccagccacattacaacaatgtaacaataaacatttattaattgcttaagccaatttgagttaggttccttatataataaatgaagtcaaaaaacaatgattgagttctaatgttttttagtatttgtatcttactttatgattacagtattttatataactaatcttattatttcttcctcagaaaagacattccatggccaggcatggtggctcacacctataatcccagcactttgagaggccaatgtgagagtattgcttgagcccaggagtttgagaacagcccagggaaaacagcaaaacttcatctcttcaaaaaataaataataaaaaaatttagccgggggtggtggcatacacctgtagtccaagctactcagaggctcaggcaggaggatcacttgagcccaggaggtcaaggctgcagtgaaccatgatcacgccactgcaaaccagcctgggcaacagagcaacaccccgtctccaaaaaaagaaaaagaaaggaagggaggaaggaaagaaagaaaaaaggaaaaggtgttccctcttacacacagctctgtatccatccatctttgtctgtgttctctctacctagaaaaagaggaccatccctcattaccaccattccttgttaattcctctctccaatccacctacaactcatgttatcctcttatattccaccacaccactgttatcgtctactcacttcacttgacaataatgtaggctgggcgtggtggctcatgcctgtaatcccagcactctggaaggccaaggcaggcagatcacctgaggccaggaattcgagaccagcctggccaacatggtgaaaccccgcctctactaaaaatacaaaaagtagccaagcatggtggtgcacgcctgtagttccagctactcgggaggctgaggcatgagaatcacttgagcccggaaggcagaggttgcagtgagccaagatcacaccactgcactccagcctacgcgacagaaggagactgtgtctcaaaaaaagaaccaataatgtacagagttggcactacattacccttggttaaatgctgtctgtaattcctctgagtttgttttcatataccagtcttgccacctcaagccagcctgaaagcccttgcaggcaggaactgtggttgttctaatttaagatctgtaactcatctatagataataaacgtattccaaaaaggcactctctaccttccctgccacagaccttctaaacaagccagaaattcctaaacagaataatctcacaaattcagtacctcgtatgtccaaactaatctcaaaaggacaatgaataactttttttgcacttaagaaaaagcaattattatatattaactcaggacaagttctaaagcctaggccatttagtttcaaaagcacaggggcccatttttttggttacttacctaggacctagcccagggcctggcacaaaagagacacatcataagaactgactgaataaatgaaaaaggtagagtgtagtacttaagcacacaggacctaggtagcccgattctaatcctgcctccctcacttattctttgtgttactttgggcaaagtacgtattctgctctgtaaaatggagatagtaataccacctacctcttaagtttaactattattattagtgaatgaagctattttccacagttctaaactttaaaggttaaaatctgagtgaagcaaaaatcagcacctctttcctaattcaaacttcaaacacctatctacttaggacttggacctactttaattaaaaaaaaaaaaaaaaaaaaaaaaaaagcctggatgtggtgactcacacctgtaattctagcactttgggagaccgaagcaagtggatcacctgaggcctggagtctgagaccagcctgggcaacatggtgaaaccctgtctcaactaaaaatacaaaaattagcctggcattgtggcacatgcctatagtcctagctacttgggaggctgaggcaggagaatcgcttgaacccacaaggtggaggatgcagtgagccaagatcgcaccactgcactccaacctgagtgacagagcgggactctgtttcaaaaacaaaatccctgtctagactctagcaaacaatgttttcattcatgaacttagataacactatatataaaaatacttttagctccctaaaaacatattctgagaatgattatttacaatcataaatctaatgccacattaaatacttcaaatacatttaattcaacaaaaatctagtgagtacctattaagctcaagaatttattctagatatcacagaaatgaacacataaacctatgtaaaaacccatattaaaattataaaagaaacatctttaagctgaaactgaggcatgttctcacattaatatttaaccagctaaatattaaatagccagagtcaactaaaccaaagttaagaaatttaagtcaaaaaatttaggatgtagaaggaatatgttcagccgccacattttattagtgtgaaaatgaggccaacagaaagaagccagttaagagattgccaaagcgtcaaagctggaatcagggtctctcagtcttcaattctcacttttcccacttctaattcaccagtgctactcaattggtgaactggatgtgcaaacatgctaaaggcattaaacctaaaccatactacctatttcacagtgtcacaagtataaagatttagccaaatgcaagtagaagaaaatcctcatactgattacaatgactacaaagctcagaaatcaagattttttttcattaaatggaggccttagctgattcaaaatatcatacagtatttttatgtactgactgaatccagtagaaacaaactttcagtaagattaaacaaaagcatttcataaatggcaaagtattacaagaatgcatagcattccttcatttcaatccaacctaacaagatattttcctcctcatactactgatacaaactgcaggatttacataaagatattattttgccatctcaccacagaactgacccaataattcatacaaaagaaaaactaattattaggcagcctcctaatttaactgtgttagtaatgagaacaatactgttgtaggttaaacctaaatgtactagtaagtctagaaataatttactttaggataattcagaagacaacattaaagctcagctgaatacaattatatcactgaaagaaacaagtcaggttctctcaggccatcagctattgttaaaatctaacacccaagattgttggtcttctccacagtggtggatttaatagcagctaccagcactcatttctagtgcaagcagtttaagcaggattttatacgaacattttaataaagttcctcaatgagtttacacacacacacacacacacacacacaccctgattattttggtgaattttagttaattctaatgtttttaactttagaatattttaaaattctcaaataactagaatgtgtgaacgttcaatgaccaaacatagaaggagtattctaatatactgattttgcagattaagcaatctacgcaggacccaaactttttatcagataataaagctgagtgtcagaatttggccaaaatgtaccaagaaactacctgagttcttttccaaaggaaacataaaggtaaatatgcagaacttcaaggcagctgtgagcagccaagttgtggagggcctgacaaaagtgagtcagaagggaaaatgttcaaagagaaaaggaggcagcaggtgtacaaggcaaaacacaccttaaaaaatatctttacaggctgggtgcggtagctcatgcctgtaatcccagcactttgggaggccaaggtgggcagatcacgagatccggagatcgagaccatcctggccaacgtggtgaaactccgtctctactaaaaatacaaaaaattagctgggcatggtggggggcacccgtagtcccagctactcgggaggctgaggcagcagaatggcatgaacctgggaggcggagcttgcagcgagcggagatcacgccagtgcactccagcctgggcgacagagcgaaactctgtctcaaaatatatatatatatatatttttctttttacgtcagttgctgattctaagttatgatgcaacttgtaaaatcttgttctgatggcatggcaaacctagggactttggaagatggcagacctgtttcctccaatgaagcagcataccattcttggaaagggaattactttttttttttttgagacacagtctcactctgctgcccaggctgccaggctggagtgcatggcaaaatctgggctcaccgcaacctccacctcctgggttcaagcgattctcctacctcagctgcccaagtaggtgggactacaggcgcgtaccaccatgcccggctaatctttgtatttttagtagagacggagtttcgccatgttggtcaggctggtctcaaaatcctgacctcaggtgatccgcccatctcagcctcccaaagtactgggattacaggcgtgagccaccacgcccagcctagaacattatttttaacccactaattcttggattcttgaacttgtttctatgtacactcaggaacatacagctacaaacggggagtaaccaaagccactgaatatatgcaggagcaacttttttggagtatcaatttaatcaaggattatagtaaaatcagatatacttttgttaaaataaacacaaatatattacaggttgaccatccctaatctgaaaattcaaaaccctccaaaatctgaaactttttgagtgccaacatgacacctcaaatggaaaattccacacgtgacacctttgcttctgatggttctctgaaccatcagaaacactgtttatttcaagaacaaaattattttaaattttgtataaaactggtcggttgtggtagctcatgcctgtaatcctaacactttgggagaccaagatgggaggatcatttgagccctggagttcaaaaccagcctgggcaacatagtgagaccctatctctgaaaaaaaaaaaaaaattaagtccaggtacagtggctcaggcctgtaatcccaacactggaaagccatggcaggtgaatcacttgagctctggagttcaagaccggcctgggcaatgtagcaaaacctatctctaccaaaaacacaaaaaattagccaggcatggtggcatgcacctgtagtcccagctacacaggaagccaaggtgggagaatcacttgagcctggaaggtggaggctacagtgagcagagatggcgctactgcactccaacctgagtaacagaatcagaccccatctcaaacaaacaaaaaaattagctgggcttggcaccgtgcatctgtaccagttagtaccagctacctgggaggctgaggcaggagaatgacttgagcccaggagttctaggctgctgtgagctaggatcacattactgcactccagcctgggcaacagtatgagacatcatctcttaaagaaaaaggtaaaaaaaagaaattatcttcaggctatgtgcataatgtgtacatgaaacatagaatttcatgtttagatttggatcccatctccaagatagtacattatgtacatgcaaacatcccaaaatctgaaaaatctgaaatccaaaaaacttctggtcccaagcatttcggataagggatattcaatgtatacagagcaaaaggcagaattctcactgtttcaagatagaaaaggagtcctcagagagatatgtcctgcttgtaacaaacagctccaaacagccctagaccctgaaaagtactttaaggaaagataaagaggtactggtttagaccatttatagataaatatgcatggctaaaacccctgaatgtaatccttccaggcagaagataaaacctgaaatctaacgtataaattgtcatgggtacaatattataaaagagaccataagttaccgagaacatgactggaattcaggaaatgctaaaggtcctgtcttatctctgtaactcatttacaaagaaatcatgtatgattttctcaactgcaatcttttttgtttctgaattagactgacaaaaattatagaatataatattcaatattttccaccatattccaaattctcactatcacatttaaacacaattttatctaatgaaatgtgtcccaaatgaaccaactttaaccagcatcagaaaaaataaaataaaatagttaaatgaaactgtatcttctttggtataagaagtccttcaggccagacgtggtggctcacatctctaatactagcactttgggaggccgaggccagtggtttgctagaactcaggagttcgagaccagcctgggcaacatggtgaaaacccgtctctactaaaatacaaaaaattagccaggcgtggtggcatgcgcctgtagtcccagctactcgggaggctgaagcaggagaattgcttgaacccagcgggaggtagaggttgcagtgtcagtgagctgagatcgcgccactgcactccagcctgaacgacagagcagactccgtctcaaaaaaaaagaaagaaatccttcagcacagagggtaggaaaaaacaactactcacacttcccagaatacctaccgtggcaataccaaaatatgaccatgcttgttaatatttgggctacggcattaaatgtttataacataacacaaacacttgtaatccaaatgtgaatgattatcttcaattttcagtaaaataagaccctataaaagccctaccattaatacatattcattcataaacatactgagtaccagtggatgttaaacactgtagaatctctaaggaaagaatactcggtcactttataagctatgtggtagtcaagaaaaatcctttctactcattgatacgttaaatgatcaaaaaatccaaagctaaaaaatgatcagagaacaatgaaaaaattttagtggctttatgcttccaattccattttcttctggactcttttctgaagcttgcctaaatcatcccaggaatgctaaaattgggtgttatttatggcataaccaaaatgaaataacaaagtaagtaccccaaataaaactaggagaaaaaatccagggaaccaagcaggcagtaaggatctaaagttctatacttggaacctctaccctgaatgttaaataatagatgttttttaaatagttgactaccaagtgtggtggcatgtgcctgtaatcctagctacttgggaggctgaggtggagagactacttgagcctaggagttctagactagtctggacaaatagcaagaccctgtctcacgggtaggggagcaggggaaggcaaccaagctgggtgtgccatgtgcctctagtcccagctacttgggaggctgagacaggaggagtgcttgaaaccataggccactgtactccagcctaggcaacataggaagaccctatctctaaaacaaacataaacaaaaaggccgggtgtggtggctcacacctgtaatcccagcacttgaggaggctgagttgggaggatcacttgaggtcaggagttcgagaccagcctggccaacatgataaaatttttgtatctttagtctctactaaaaacaaaaattagctgagtgtggtggcaggggcctgtaatcctagctacttgggaggctgaggcataagaatcatttgaacctgggaagtggaggttgcagtgagcggagatcacaccactgcactccagcctgggtaacagagcaagactctatctcaaaaaaacaaacagttatatctttaattattatcttcattcagtaattaggcaattagaatttacaattgctaaatgaatgttcaaagttcaaccaaaattagtccaagatgaagccaagaacacatctcaactcattcaataaagccattattactctgatgccaaaaccagacatagatatcacaagacaactacagaccaatatatcttatgaatacagatgtaaaagtcctcaacaaagcaaaatgaatccagcaacatattaaaaggcttatacaccattgctaagtatgacttaatcccagggattcaaggttggcttaacttctgaaaatcaattaatgtaatacaccatattaataaaggatacaaaccacatgatcatttgaatagatgcagaaaaagcacttaacaaaatccaacatgctttcatgataaaaacactcaacaaagtagaaattgaagaaaacatcttcaatctaataaaaaatacctatgggggaaaaaaagaatacctacaaaaaccccatagctaaaatcatacttaatggagaaagcctgaatgctttctccctcaggtcaagaacaaaacaaggatatccactcttaccactctgtttaacactgcactgaaggttatggccagggcaaataggcaagaaaaagaaataaaaatcactcaggcttaaaaaaaagaaggaaaactacctttatttgcagatgatataatcttgtatatagaaaatcctaagaaaatcccacaaataaactattagagccaataaacacatccaacacagttacaggatacaagctcaatatacaagtagtaatcgtatttctatacacaagcaataagcaatctgaacatgaaaagtttttaaaaattccacttacaatagcatccccccgccaaaaaaaaaagacttagaaagccaagcacgatggctcacacctgtaatcccagcactttgggaggccgaggcaggcggatcacttgaggtcaggagttcaagactagcctagccaacgtggtgaaaccccgtctctactaaaatataaaaattagttgggtgtggtggcaggtgcctgtaatcccagctactcaggaggctgaggcagtggaatcacttgaacccaggaggcggaggttgcaatgagccgagatcacaccactgtactttagcctaggtgacagaatgagacactgtctcaaaaaaaaaaaaaaaaaagacttagaaataaatttaacaaaagcagtgacaatcttatactctgagatatataaaaattacaaaagaagttacagaaatcctaactaaatggaaaggccaggtgtgatggctcacacctgtaatcccagcactttggtagactgaagtgggtgggctgcttgagcgcagaagttcaggatcagactaggcaacatggcaagaactcatctctacaaaaatacaaaaatgagctagatgtggtggcatgcacctgtaatcctagctgcttggggggctgaggagggaagatcacttgagcctagtaggttacagctgcagtgagccatgattgcattactgtacttcactgcagcctggatgacagaacaagactgtgtcccccaaaaaaaaaaaaaaaaaaaaaaggaaagatatcccatgttcatggatgagaatggatcagaagatacaactctgttaaaatggcaatattccctaaattgatctacagaatcaatgtgatcccagcatacccaaaagaaatttgaataggaaaaacaaagttgggggactcacacttcctgatttgaaaacataattcaaagctatggaaatcaagacagtgtggtagtggcataaggataaacatacagatcaatggaatataagtgtgggttcagaaataaacctttacactgacagtcaattgattttatgacaaaaatgccaagacaattcagtggaggaaagaatggtctttttaagccaagtgctgtagctgacacctataatcccagcatttggggaggctgagacaggaggattgcttgaggccaggagtttgagactagccagggcaacaaagcaagacccccatctctacaagaaacaaacaatggtcttttcaacaaaccatgctgggacaactgaatattcacatgcagtagaatgaagctggaccactatatctcacaccatacacaaaaattaattctaattaaatttaaacacggattatagacctaaatgtaacagctaaaacaataaaattcctagaagaaaacaaagctaatcttcatttcatttggtggcctgacatcaaaaccacatgcaacaaaggaaaaaacaagtaaatttggcttcatcagaattataacattttgtacattaaaggacaccatcaagaaattgaaaacacaacccatagatgggagaaaatatttgcaaatcatgtatctcacaagggatttgtatctagtatatttaaagaactcttacaactcaacaataaaaagagaatccaattttaaaatgggcaaaggctgagcatggtggctcacaccagaaggagaggatcccttgaggcaaggattctgagacctgccagagcaatatagcaagaccctgtctctacaaaataaattaataataataaaaaaaaacaattagccaggcatggtggcacacacctgtagtcctagctactcaggagcttgaggcagaaggaacccttgagtccaggagtttgaagttccagaaactatgattgggccgggtgcggtggctcacgcctgtaatcctagcactttgggagtccaaggcgggtggatcatgaggtcaggagttcaagaccaacctggccaagatggtgaaaccccatctctactaaaaatacaaaaattagctgggcgtggtggtgggtgcctctaatcccagctacttgggaggctgaggcagagaatcacttgaacccaggaggcagagattgcagtgagccaagatagtgccactgaactccagcctgggtgacagagcaagactccatctccaaaaaaaaaaaaaaagaaaagaaaactgcgattggccactgcactctagccagagtgacagagcaagacctagcctaaaaaacaatagtgtataaaaataaaattaaaatgtgcagagaatttaaatagacatttctccaaagaagatatatgaatggccaataagcacatgaaaagatctcatcaggttgagcacaggggatcaggcctgtaatcccaacactttgggaggccaaggtgcggggactgcttgagctcaggagtttgagaccagcctgggcaacatggtaaaaccccatctctacaaaaaatacaaaaaggccaggtacagtggctcatgcctttaatcccagcactttgggaggctgaggcgggtggatcacctgatgtcaagagtttgagaccagcctggccaacatggtgaaaccccgtctctactaaaaagacaaaaattagccaggtgtgatggtaggcgcctgtaataccagctactggggaagctgaggcaggagaatcacttgaacctaggaggcggaggttacagtgagccaagatcacaccactgcactccaacctgggtgaaaggcaaaaatccgtctcaaaaaaaaaaaaagtttcaaagataaaacaaaaatcttgttaaagataaatacacgagatgctaaagaaataatctacttcttcaagtcatgctatcaatttgcaccaaaattttcatttcctatgtgtaggtgttgagggtcttgtacccatgataaatgacatacacctgttctgggctgacttttgttccccaaaagagatatatagtactccaaggggctgggcacagtggcacatgcctgtaatcccagcactttggaaggtcaaggccacagcatcgcttgagctcaggaattcaatatcagcctgggcaacatggcaagaccccggctctactaaaaatataaaaaaatagccaggtgtggcagtgcacacctgtagtcccagctacccgggaagctgagatgggaggattgcttgagcctggggtttagggggctggaggttgcagtgatccaagtgccactgcactctagcctggatgacagagggagaccctgtctcaaaaaaaaaaaaaaaaaaaaagatatgtagtactcctaacattcagcacctcagaacctgatcttagagacaggatcttcaggccaggtggcttcccttcctctccgcgtcagtctgtcccacctcagctcagcccaccggagacagagggtgcaggaacctggaggcggaggttgcaggaagccgagatcctgcaactgcactccagcctgggcgacacagcaagactccgtctcaaaaaaaaaaaaaaaaccttacaacaaaatgatgcagcccgggcgcagtggctcacgcctgtaatcccagcactttgggaggccgagtggggcggatcatttgaggtcaggagttcgagaccagcctggccaacatggtgaaatcctatctcaactaaaaaaaaaccaaaaactacagaaattagccaggcgtgatggcgcatgcctgcagtctcagctgcttgggaggctgaggcaggagaattgcttgaacccgggagtcggaggttgcagtgagccaagattgcgccgattgcactccagcctgagtgacaagagcaaaactccatctcaaaaaaaaaagaaaatgcaaagtcacctaagagacagtttaaatacataaaaagctcgatgccaaataaaactggatgggtcacttgataagtgggattgataaaaagcaagacagctgatattatataattcttatttgcttcgatatttactggggaaggtagaggggaaaagctatctaaattactcttaataagcatacaaatctctaatagtgaatcaaatgcatcattaaatatactaaattcctcaaactgatatgtcagatgtcaggtagtcatgaagacccaaaatagtctccatgggttttttgttgttgtttttttgagacagagtctcactctgttgcccaggctggagtgcagtggcaccatctcgactcactgcaacctctgtctcccgggttcaagccattctcccacctcagcctcccaagtagctgggattacaggcatgtgccaccacatttggctgatttttgtatttttagtagagacagggtttcactatgttacccaggctgttctcaaactcctgacctcaagtgattcacccaactcggcctcccaaagtgctgggatttcaggtgtgagccaccacgaccagccccttctctgtgttttaaaggcatttaagtataaattattaaactgcaggacagaacatattagctgacggtcatatgagtgaccttctctaaatgccaggaggatagaatccacttttcctttatcaatattttccttgctcaacttctgacatattaggtactcaataagtatgtgctgaaccaaaacgaacaaaaaaatgctgtcatcaaagtaacttccatctactcaagtaggctgcaacttcaaactgcccaaactagcaaatctctaataaagatgggctcagaagacatatcagcatgaataaccttctgaggaaaagacaacatggattctaaaagtggacatcacaccacaccagttcacccaaattctctgagaaaataaatatgtgtggctgggtgacggtggctcatgcctgtaatcccagcactttgggaggctgaggcgggtggatcatgaggtcaggagatcgagaccatcctagccaacatggtgaaaccccaactctactaaaaatacaaaaattagctgggtgtggtggtgagcacctgtagtcatagctactcgggaggctgaggcaggagaaacgcttgaacccgggaggcggaggttgtagtgagccgagatcgcaccactgcactccagcctgggcaacagagtgagactctgtctcaaaaaaaaaaaaaaaaaaaaaaaaaaaaaagacctgagtggccacaggatgagaacatttactgtagactggacataactgagacacagaaaattataggtagatgctgaggtacttccccaaatgaagaagtaaaaacagaagattgaaaatttttttagaaatgctatatttaacattttaatatattgtacaaaaaatatacagagaattccccattttgcagatgggatgatgagattcctaataatgaaataccacacgagttggaaaaataagggaacggagtgatggaaagggtttctaaatatattaaatgagaaacatttgcaaaaactaagatttatattcagcttagagaatgctttggcaagtataaaagctgtctaaatatgtgaagggttatctagcagaagacaaaccagacttgctctaagcagttcccgtgtagacaaaattgggcccaaagtggcaattccagaagggcacgcttcaactcaagctttctaaccatcagacctaactaaaaaggtggttcttaccttggattacctctaagagcccactgagatatgagtgttaaaaaattacatgcgaggaaatggcaggtatgttacagcatggacaaatgaaaagtaaggcatttacaggaaaaaaaatctaagctatacttaaaagactcatgccttcaagtcaaaaaaggaatttttgaataattatagaatattccctaaagacaatgtgatgttctatgcaaaaaaaaaaaaaaaaaaagggagggagggaggaccaaatcctattaggaaaaaactgtaaatcaagggtacccaatcgtttggcttccctgagccacactggaagaagagctgtcttgggccacacataaaatacactaaagtaacaatagctgatgagctaaaaaagaaaatcttaaaaaaaatctcataatgttttaagaaagtttacagatttgtgttgggccacattcaaagctgtcctgggccgcatgcagcctgtgggccatgggtcggacaagcttgctgtaaatagaacatattttcttatccttctaccaaatcacagtgtagttataactaaaatgcagttctgagtagttatcataaatccagaaagggaaagcaatgctgacaaagatcctggaaggaggtttcactggagattaaattaaaaagtcaagcatcttcagttgagaaacatgaaagcaaaggggcaatgtgatcaaaatcagaaaacgtatcaatatggtaaatactaatttattcaccttttatgcttgaaaagtatttctttatataacagataaaagaaacttgtggattgtgttaccacaatctacaagttaaaaatagattcaagtgctcggataaatgtaggtatattaggtccattcaggtcctacaggatagaagtgctatcagacgtgaggccctaaatttctgaggttaacatcttaacagataacaatgtttcacctgaaaacatcacttggtgccaatttagacagaacaattggttggacagaccccggacagacagactcaaggaggctggttggtatagacttccttccattcttttacctcagtatgtatgtgtgtgtaatatatacatacatattatactagaacatatatacattccttatctttatacacttagaatgctccttatatagctctgcaccctgaatttttcatttatcatttactcaacatcctaagacattaaaaattctttttttttttttagacagagacttgctctgtcaacaggctggagtgcagtggcaccatctcagctcactgcaacctccaactccctggtccaagcaattctcctgcctcagcctcctgagtagctgggatttcaggcacgtgccaccacgcccagctaatttttgtatttttagtagagatggggtttcaccatgttggccaggatggtctcgatctcctgacctcataatccgcccacctcggcctcctgaagtgctggaattacgggcatgagccaccgcacccggccagaaaaattctttcaaatactattccatggttgtaaatgtccatccttaaatataccatgatttattttcctataaatcttgctgctcatttaggtttattctcaattctcactaatatgaataatgttacaatgaacatctttgttcacaaatctttctatgtatcttaatttttcccctttaggataaattcctagatgtgcaattactgaattaaagaacgtttttaattttgccaatatatgttgccaaaatatctttcaaaaaaactaggcccaatgcacactccactagcagtttcagagattgtcccctcaccaccttcgacagcacagtcaactgtaaatctgataggttaaaaaaagagtatgtcatttaatctgcattcctttgattacttatcaggataaaaatgtttctcatatgcttcttggtcatttgtatttcttccttatgaactctgatcatgttctttgccagcaaaacttttctttctcttggccgacaaactttctgtggaaaaccagctgagatggaatcatttaaatatcagcaactgcagctccccctgctgacagataaattaccaccaccatcaagtgcccagtaaaaaaaagtgagctagaaccatacgcttgcctgtcttctgggctgctgctacaaatacaaattatacacggtaataaaaaagaaaatactgtgtatctaaactcatacttaacagagctgtgatggagaaggcaagggggacaagcgttttatttgttttttgttgttgttgttgttgttgttgttttttgagacggagtctcgctctgtggcccaggctggagagtagtggcgtgatctcagctcactgcaagctccgcctgctgggttcacaccattctcctgccacagcctcccgagtagctgggactacaggcacccaacaccacgcccggctaattttttttttttttttttttttagtagagacggggtttcaccatgttagccaggatggtcttgatctcctgacctcatgatgggcccgcctcggcctcccaaagtgctgggattacaggcgtgagccaccgtgcccggcccaaacgttttctaatgtgcaggaactaggcggggtgcagtggctcacacctgtaatcccagtactttgtggaggccgaggtgggtggatcacctgaggtcaggagttcaagaccagcctggccaacatggtgaaaccctgtctctactaaaaatataacaatcagccgggtgtggtggcacgtgcctgtagtccgagatactcaggaggctgaggaacgaggattgcttgaacccaggaggtggaggttgcagtgagccgagactgcgccactgcactccagcctgggcaacagagtgagactccatttaaaaaaaaaaaaactaatatgcaagaactaatgtcacaaacaattctaaaaatcaattccctgccaaatatactacctggcacatataaacatcacagacctaaatattcatttccctatactttaactatgtgaaaacactctaaattaccaaatgacactgggtggtcagcaaactagttctctttttccaaaagcaaaaacaacaaaaacacttttgccctttagcattcaaagaaagagtattaaaaatcttaattcttggcaatccttattccaaagttgcttgcacttatcagactgggaccaatagatccaaagagtaaggccaagactggcaaatgcatgtgactctcagcttttccactgataccctcctaaagatgcatgtcccaagtccagcaatacagtctttaacactcatttactaagtgccatcaagagcaagcagtgatggccgggtatggtggctcacgcctgtaatgccagcactttgggaggctgaggggggtggatcacctgaggtcaggagttcgcaaccagcctgaccaacatggtgacaccctgtctctactaaaaatacaaaaattagctgggcgtggtggcaggcacctgtaatcccagctatttgggaggctgaggcaggagaatcacttcaacctgggaggcagaggttgcagtgagccgagatcgcgccgttgcgctccagcctgggcaacaaagagcgaaattccgtctcaaaaaaaaaagaaacaaaaacagcaagcagtgaggataaaagacaagagcaagtcctcactctcaaagaacctagacactagctgggttcaaagtggagcaaactagcaatcagtacaatagaagtgctaggtctgcatatgcacactcacatgcacacacactaacagtttcagagattgtccccttaccacctttgacagcacagtcaactgcaaatctgataggtaaaaaatagtatgtcatttaatctgcattcctttgattatttatcagaataaaaatgtttctcatatgcttcttggtcatttgtatttctttatgaactctgatcataaagtgataatacctgggtccagaggaagcactcagtgtcagctactgttattactattatcactactgttattttgttttaaggctaatcaagtgaagcagtgggagtggagaaggaacaaagaaatctgtaactggctgtgatcaattaatagtaaacaccaatatacttggaccagccactactgttattaaagactagggggagtaagtttccagaacagggtagagtccatcttaagcagaggtaactgcttgtgtgaagacccagaggcaaagaacaacagggttcacagaaggaactgggcacaagctatctgtactactgcgtacaggatgctcaggaagaagtggagagatgatctggcaaaacatttcaactctaccttcaaagctagttgagccatggtggaagagggagggatatgatcatacgcttgaacatgcattttacaaggatcatgttggcagcgacttggaagagagaaagcagtcaaggagaatgattacaagacaacagaaggtcacgcagccaaaagggcgatgaaggtctggactcaaaaaggagaagtaggatgactaggaaaatattatgagctaggatctcaagaatgtggtgactagaatggcacaagaaggaacccagaggcctctcaaatccctgatttgagtgactggctgggtgacactaccgctcactaagatacgaagataggaagaggttggactggggaagtggataagatcattttaaaatgcccataagatggccagatgcagtggctcacgcctgtaatcccagcactttgggaggctgaggcaggtggatcacctgaggtcaggagttcaagcccagcctggccaacatggtgaaaccccatctctactaaaaatacaaaaactggccggacgtggtggcgcacacctgtaatcccagctacccggaggctgaggcaagagagtcgctggaacctgggaggcagaggctgccgtgagccgagaccgtgccactgcactccagcctgggggatagagcgagactccgtctcaatagtaataataataataaaaaaataaaataaaatgcccataggacatccaagtagagatgtccaggaagcaactgtgtatatgggattggagatcagaaaactagtcagagctggaaaaacacacatttgcaaatcatcggcatatagacggcaagtgaggcacaagtttatctaaggcattcctcataaactgcacagggtgagaggaagaagggtcaagggaaggcaaatactaatgtttttaggagcaaaagaggaaaaaagtctgcaaagaaaaccaagagtatgggccagacttggtgactcacacactttgggaggccgaggcaggtggatcacctgagatcaggagttcgagaccagcctggccaacatggtgaaacccatctctactaaaactacaaaaattagccagatgtggtggcgggcacctgtaatcccagctactggggaaactgaggcaggagaattgcttgaacccaggagacggaggttgcagtgagccgagatcacgccactgcactccagcctgggcaaaagagcaagactccgtctcaaaaaaaaaaaaaaaaaagtttcaaagataaaacaaaaatcttgttaaagataaatacatgagaagctaaataaataatctacttctttaagtcatgctatcaatttgcaccaaaattttcatttcctatgtgtaggtgtcgagggtctagtacccatgataaatgatatacacctgttctgggctgaattgtgttccccaaaagagatatgtagtactccaggggcctgggcacagtggcgcattcctgtaatcctagcactttgggaggccaaggccacaggatcgcttgagctcaggagttcaatatcagcctgggcaacatggcaagaccccatctctactaaaaatatttaaaaatagccagatgtggtagtgtgcacctgtagtcccagctactcaggaagctgaggtgggaggattacttgagtccaggggttagggggctggaggttgcagtgatccaagtgccactgcactccagcctgaatgacaaagggagaccctgtctcaaaaaaaaaaaaaaaaaaaaagagatatgtagtactcctaacattcagtacctcagaatgtgatcttagagacgggatcttcagaccaggtgcagtggctcacgcctgcaatctcagcactttaagaggccgaggtgggtggaccacttgaggtcaggagttcgagaccagcctggccaatgtggtgaaaccccatctctaccaaaaatgtaaaaattagctaggcacggtggcgagcacctgtaactccagctacttggaaggctaaggcagaagaatcacttgaacctaggaggaggaggttgcagtaagctgagatcaccccactgtactccagcctgggcaacaaagagagactctaaaaaaaaaaaaagagataggatcttcaaagaggtcataaagttaaaatgaggtcatcagagaggactctaatcccaatatgacttgtccttataaaaaaggggaaattgtggacacaaagaaatacacacagggaggctgggcgccgtggctcacgcctgtaatcccagcactttgggaggctgaggtgggcagatcacttaaggtcaggagtttgagaccagcctgggcaacaaggtgcagccctgtctctacaaaaaatacaaaatttaggctgggtgctgtggctcatgcctgtaatcccagcactttgggaggccaaggcaggcagatcacctgaggtcaggagttcaagaccggcctgggcaacatggtgaaaccctgtttctacaaaaaatacaaaaaattacctgggcatggtgacacgtgactgtaatcccagctacttaggaggctaaggaaggagaatcacctgaacctgagaggcagaggttgcagtgaaccgatattatgccactgcactccagcctgggcaacagagcaagactctgtctaaaaaaacaaaagaaatacacacagggagaactctacataaggactggagttatgctgccaccagaagctagaagagaggcttgaaacagatcctgtcccagttgcttcagagaaagcatgcctctgcccttagatttctagcctccagaacagggagacaataaatttctgttatttaagccactcagcatatgtcactctgtggcagcagccttagcaaacagatgtcataagaaaattcgcagctcaggtttactaagtacctaccaggtgctgttctaaacactctgcgtgaataaactcatttaatccttataaagtccactctaggatctaggtactatcattataccctttttacagtgtggacaccaaggttctaagaggttaatgagcttacccagtatcacatagccagagccctctctctcaccactagtgtatgaggagctattattaacagtaattacaataagagctggcgtggtggctcacgcctgtaatcccagcactttgggaggccaaggcgggtggatcacttgaggccaggagtttgagaccagcctggccaacatagtgaaaccccgtctctactaaaaatagaaaaataagccgggcatgctggcatgcgcctgtaatcccagctacttgagaggctgaggcaggagaattgcttgaactcaggagacacaggttgcagtgagccgagatcgtgccactgaactccagcctgggcgacacagcaagactccatctcaaaaaaaaaaaaaattagtaattacaataagaacagtagtagtccactgaaccaaacactgccctatgtcctttacagatataatacaaaagtcctctgaagtaagtgttattatttccagtatgaaggaggaacctgaatctcagagagattaagaaaatcgcccaaagtcacacggttaagagtgctgagattaggccgggcacggtggctcatgcctgtaatcccagcactttgggaggccgaggcgggtggatcacctgaggtcaggagtttaagaccagcctggccaagctggtgaaaccccatctctactaaaaataaaaaaaaaattagctggccatggtgacaggtgcctgtaatcccagctacttgggaggctgaggcaggagaatcacttgaacccaggaagtggaggttgcagtgagccaagatcacctggacaacaaagcgagactcttgtctcataaaaaaaaaaaaaggaagaagaatgctgagattatatctaattgctaacttaaggggatatacaatgaaaacctgtttttactaaaactttaagaacaagttaattttttttttttctttaatgagacaagagacaaggtctggctctatcacccaggctggactgcaggggcgcaatcacagttcactgcaacctccacctcccaggctcgagccatcctcccacctaggcctctcaagtagctgcaactacaggtgcacaccaccatgcctggctaattttcttttgtatttttagtagagatggggttttgccatgttgcccaggctgttctcaaactcgtgtgctccagcgatctgcctgttcagcctcctaaagtgctaggattacaggcgtgagccatcgcgtctggccaagttaaattttttaatgcctgactttgcagttcaatactagaaatatacatctataaattcaaaattcttgaagatcccaagagaacacatgtcctagattatgggcccttttgcgtgtgtatcccctcaaccactgttcaagaactattctctcggctgggcacggtggcccacgcctgtaatcccagcactttgggaggccgagttgggcggatcatgaggtcaggagatcgagaccatcctggctaacacggtgaaactccgtctctactaaaaatacaaaaaattagccgggcgtggtggcgggcgcctgtggtcccagctactcgggaggctgaggcaggagaatgacatgaacccaggaggcacagtttgcagtgagccgagattgcgccactgcactctagcctaggtgacagagtgaggctccgtctcaaaaaaacaaaaacaaaaacaaaaaaactattctctcagttagaacccttgccatttctctgacttccagacacagaaagagaagaaaaggaaggattgagatgctgttctttaaaatttttttttttttttgagacggagtctccctctgtcgcccagactggagtgcagtggcacgatctcggctcactgtaaactccgcctcccgggttcacgccattctcctgcctcagcctcccaagtagctgcaactacaggcgcctgccaccacgcccagctatttttttgtatttttagtagagacggggtttcaccgtgttagccaggatggtctcgatctcctgacctcatgatccgcccgcctcggcctcccaaagtgctgggattacaggcgtgagccactgcgcccagctaaaattttcaattttctatttaatttttaaaatctgatacaaacatcagaaagtgtaaaaagatataatgcaatgagaagtctccttcctactctgtcctctacctgaacaattcctagacctaacaggtaaccagtgccaccattttcttatttattcttctaaaggtttgtgttgttgctgttgtttgagacagagtctcgcttggtcagccaggctggaggacagcggcgtgatctcagctcactgcaagctccgtctcccgggctcaagcaattctcctgcctcagcctcccaagtagctgggattacaggtgtgtgccaccatgccccagctagtttttatattttcagtagagacggggtttcaccatattggccaggctggtctcagactcctgacctcaggtaatccacccaccttggactcccaaagtgctgggattacacgtgtgagccaccatgcccagccctaaagatcttttttttttttttttgcatacatacaccaatgcaaattatctttttctcctgtttttttttttccaaaaaacacaaagggtatcaaatcatacatactgttctgcatcttgctttcatcacttaactgtctgccttgcagatctttctatatcatattaaattatgttttaattctctcgttttgcttgtcaagaacagtttttacttcatttcaccatagttcagtctagcacacaaggcatccagcagccctaagaactacctgaaacaactgatgatggctccatgctacacactaaagaccctgtatcttttctctcctcctcatcttcatttcactcttttctccgactcactcaattctccttcctttccctattcctctcccatctcacccactccttagccctaaccctgacaactagaccctagtaacatcactgacattgcttagtcgtggctagaaatattcaggctttaaaaaggtacagacccctaacacagagaaaaagggataaataataatttccatgagaacttctaattaacgagagtgccttaaattgaggagttttggcttggagttattcttccttgttacttgcctcctctggcattttcatttgtgaagactgagtgagtgtgacgctattttctatacgcatggaaacaagcacatactcagtctaacatttacgcaatgcctgacagaacgacagagttcattctacaataagataattggaaacaaaatataagatctatataaaataaacatttgggctccaaaatatgcactttaattaacctatcatttctttttacttaaattaagtagctccaatctgaaactacatcttagaaatgttttaaggatattcaccaatgaaaaagagaataaagttccctctccccacttttattttccagcccacaaactcaatgctatcctccccgcaaaaaggacctttttttctgaccagacgaacactgtaatttttaaggtttctaagtaataaaaataggaagaaaacattaccccccaaaattggtttacacttagaagatgtttcccactgagcaaaggattggtaaggaacataatattaaggcaaccacctaactgcattcttaagtagtaacaggtggtaactcacgatatggagctgatttcctttctctattcctgccatgccagagacctctagtagaacttctgaggttactgtattacaacccaggttcagagagatttagaggtaaaaccttaaacactggaaatatctttaaaagtagggctttgtgtaccaaatacattcgttaaaacctaggaaactataaaatgaaatccaatgtattgatctcaatccccttgcctgcttcctaaagaggacagaggccaccaacactggtgctcaacacttgctaagtcgaaacactcttacacaggtcctctgattcttaacgggttcagaacttctggttgcattccccatgcaacccctccaactctacagggagaatgctggaaaaactgtgtcactttggcttcctgtatattaatataagcactcttatccagcaatagcagctgaaacataaatgaagatgagaactcagcctacatgacctaagatttcccacaagtccagatatttaggttacacacactgcactattgtctgatttctcctctgcatcaatctggaagtccacagagcagattagcacccaacaatcttaactaagctagtatcctactctgaagaaaggcgaagctggtggagggtttccaagactccttatccttctctgtccttcctcccatcccctccttacgtcttttctgtttgtttttatttaattttttttttaatgtatttttagtcacaagaaaatcaaagaagccacctacttaagtcttaagctctgccctttgcttagtcctaatggagagttctttggccatctatgtacaagagattagaggagccaaagagactggagaaccacatcaatgggagctttttcatctaaaggtcatctgtccacactgtccaaatgaggtttaccctgtgaaataaaacttggtgtaagtgctacctgctgagaaaaatagtatgaaatgtcacacaaaggactggggtgcagcaggaggactctgaaagagtcatacgtgtaaaccagcaggtcttagaatgccctaatatactatatgaagtttcagagtaaacaaatggttaatgacacatcttttgtaacacatgaatcagctactgatttgcaagagtgggacacaccctagtacctatgactctaaagtacctgtttgaaaagtggacctagatgtttgaattgccaacccatcctaagaccggaacataattttacaactatgtaagttgccataatttaaagttaaaaagatcactgcctttcattataatggaagttaatttgagaacttcattaaaacattcacaccgataatcaaagaacagtagagatacaaagtaaaatatagccaatcaatcctaggaagcaaacacaagaggcaagagaaatggcaggtaaaggaagtgaagaatagcaaattcaaaaactacaatattcccaattctaaagaaaaatgaataaaatgaggctggtaatgaaaaaataacacatcttaccttaagaggcatccaagtagcattcatagtgtcaggatataaagacaatactcagaaatgagcaagaagtcttagtaattccctcggttaccaagtataagcaggtaggaaaatcttttgtttcgagaaggtatctgaaagagaggattttcatttagactaaaaaataatcaagacaatgcaaatagtttaagctacctgggcagggattttgaagtactatttgcctcatcgcactaaaaaagtatagaaaatacagtcccctttagaaaagggcaaatgtgtgtctccatatatatgtgtgtagaaacatactttacataaaaagagaaataaatatgtaacacgtattttagataatgtaaaattgcttatcaaacaattagccaaaatcccagagagaataaagtaattttccagggtacttcataaacactaaacgtgatttgttaactaaccgtctaaagaaagacccttgccacatttaattatatttagtaaagtaaaacttctctaatcatcccgactgtcccaagattatgcttaagtttcagagtcaattccacatgaaaagtaaaacctattcttgactgaagtactagaaacaaataaaagacccttcttccccagagatcgttaaaagcagaccgagcaacttaattttgagggtgggaggaaggtaaatttgcctggaggcaggaggatggactaaatgacctctggtaggatcctcgttcaagtcctgggcctgtatacaattccagcttaaccagttactgcttcgcttaaaatggaggcttgcctgcgtagggacaaaaataacagcacccacttcttaaaaataaatgtcgaaaagtacccctttttaaataaaaataaaaaataaacacctctggagtggatgtgttcttgctatgcgtttgtcactgaggcttcgaagacttggcatcactttccttaccgctcaccggattttgggggaggagcggggggcgacagtttgactcttgacccaagtctcaggcggacttcagagccccacaggggcccccaactccagagccagagggagcggagaggcgagagcccgagatcgcacctccccccaccgcggaccccagtcccaaacccacccctcacctccccgcagtggggcgcctccttctgccccattcccattgttagggagggcagagcgcggggtgggctcagggcaggggcgcccgcggccgttgcccggctcgcttcaggaggggcgccccgcgggatgcggcttcccttcctctccgcgtcggtccgtcccacctcggctcggcctggcgccccgaggtccgctccgcgcccccggccgcggccccggcccgccccccgggcagccaggccctcaggccagtcggccggcagccggcgtcccaggcctacgagtgggcgctgggcgggggtccccgtgccccacacacgcgtcccctctcccccagccccgccgcttccagggccctcggcggcgcccgctccccgggccccgcggccccccgcctcccagccgggccgctccctcgagctcgtcgggtcagggacacctcctctacctcaccatcaccctggcccactcgtgcccccacccccaggggcaccagtgccaaaggcagctcccccagccccggacctacctgcacggttcaaccaagcctagaagtgggggcggggaatcttccgccctcctctggcgcccattggcccttcaggggcacatcgtgagcgccattggctgagcaatggtgtccgtcagagcgatggggcgggacagaagggggagagggatgctggtgccttggcgtctctgtctctgtgtatctcgttgtctctgtctctgtctcggcccttggaaacgagaggcttttggctgagaggactagaagggggcctgaggtgggaggaataggaataggaatcctgacagagcgtcacgccagttggccactctgaacgccctacctaagtcccctttaggttctcttctccatcacccccaacccctgcccctcacccctcgaggttctttcatccaggaagcgacgtgatgaaaactccaggccggaaggccatagggagagatgttatatatgtatataaaatatacacataaaaatgtttatatataaactcaaccagatatcagttcactagggcctggaaaggaaagggcacacatctcacagacagggaaggacttgagatagagccggtagaagaaggaatcaaaaatcactctaagagctggcaacagtggttacctcctgggagaggaactgagtgcctagggaaccagtgggcggaagacttacatatctcggcatatcatttgtatccattgatttttgcaccattcatcaagattccaatttaaagaaaaggatttaaatgtttaaataaggtcgcaaaaccaggggacagacaagataattgggcaggaaaattggcgcaacatgcagatttggggaggaatcttagcttttaatatgttcagctcccggtaacagggttttgtaaaacccagtgaaggtgtcccagaggcaactgaagttatggaacttgagagagggtagacaatcaggactagagaagatgcagggtcctctgcctaaagatagtgatctatgacatgctaaaggataaactcccaaagaagggtaataagacacccacagtaaaaggtaggaggacgaaaaagaaggtcagtgaggtaaaagaaacaatattaaagaggcatgaaaattaagggaggaagggtctgtggaaaatagaataataaaactatgagagaggccgggcacggtggctcacacctgtaatcccagcactttgggaggccaaggcgggtggatcacctgaggtcaggagttcgagaccagcctgcgcagcatggtgaaacccgatctctaatagaaatgcaaaaaaaaaattagccaagcgtggtggcgcgcctctgtaatcccagctactggaaaggctgaggtgggagaattgcttgaaccgggaggcggaggctgcagtgagccaagatcgcgccactgcactccagcctgggcgacacagtgagaccctgtttcaaaaaaaaaaaaaaaaaaaaaaaaacaacaaacaaactgtgagagcctcataggtcttacctctttacctctttaggctctggtaaccatgggacaataagaatgaaagccaaggccgggcacggtggctcacgcctgtaatcccagcattttgggaggccaaggtgggcggatcacaaggtcaggagatcaagaccatcctggccaacatggtgaaaccacgggcatggtggcgcatgcctgtaatcccagctactcgggaggctgaggcaggagaattgcttgaaccagggagtcagaggttccagtgagccgatatcacgccactgcactccagcctggatgacagagtgagactccgactcaaaaaaaaaaaaaaaaaaaaaaaaaacaacacctttatcgattaagaatcttttttctgagtttattaattctatttaaatcaaccccagaaaacaccttcaacacagcctctcatttcatatctgtaaaatggggcaaaaaaaaaaatagttcctaccctttagagttgttgtgaagattaaattagtgaatacatatgatggatttttttttcttttttcttttttatgagacacagtctcgctctgtctcccaggctggagtgcagtggcactatctcagctcactgcaagctccgccttccgggttcacgccattctcctgcctcagcctcctgagtagctgggactacaggcgtccgccagcatgcccgactaattttttgttatttttagtagatacggggtttcaccgtgttagccaggatggtctcaatctcctgacctcgtgatccgcccgacttggcctcccaagtgctgggattacaggcatgagccatggcgcccggcctgtgtgatggattttttaagagcctgactggcggggtgaggtggctcatgactgtaatcgcagcactttgagaggctgaggcaggtgaatcacttgaagccaggagttcgagaccagcctgggcaacatggcgagacctcgtctctacaaaaacacacacacaaaaattagctgggtatgatggtgcatgcctgtagtcccagctactcaggagactgaggtgagggtcgcttgagcctgggaggcagaggttgcagtcagccgagatctcaccactgcatttcagcctgggtgacagtgtaagaacctgtcaaaacaacaacaacaaaaaaaacaaaacaacaacaacaaaaaaacgcacgaaaaaaaccacataagctccttgagggcagaaactgtcccctagtcttctatattttatttcacacaatgtacagaagactaaatgaataattgttagctggtttttttttttaaaggggataagatcagttacaatgtctttttcctcagtcaatcacataagtatctaaaatgacattccaaagtaaggacaggagtttaaatcctgaactatggtatctaaagtaaacttgaactttccttatttttaaaaaattttggccgggcgcggtggctcacgcctgtaatcccagcactttgggaagctgaggcgggcagatcacaaggtcaagagatctagaccatccttgccaacatggtgaaaccccatctccactaaaaatacaaaaattagctgggcgtggtggcacggacctgtagtcctagctacttgggaggctgaggcaggagaaccgcttgaacccgggaggaggagactgcagtgagccgagatcacgccactgcactccagactggcgacagactgtctcaaaaaaaaaaaaaaaagaaaaagaaaaaagaaaagaaaaaaattccatacatagaattctgtgtggcattttagagaaaatcatggtgactagagacaccaggtgaaatttttttttttttttttttggtgacacaaccccaggagatcctgtgaacatgtgtcccttgaccaggtgaatttcaggagcttgcactagtcccaggttagctggcaccaggttggccctagtttgagtgccttccacataccaggtactgtgctggagaagtaacatcaaaaaggaaaatcaaatttcatcttcaataagcaatcacaatacactgtgatgagagttagggtgaaggaggttcaggttaccatgggcttatattaggagggcaaattctgtcttcaagtctttttgcttcaacagtagcgtttagatcttgtgggctgggcatggtggctctagcctgaaatcccagcactttgggagggtgaagtgggcagactgcttgagcccaggagttgcagattagcctggcaacatggcgaaaccccgtctctacaaaaaatacaaaagtcagccaggcatagtggtgcctgcctgtagtttcagctacttgggaggctgaggtaggaggatcgcttgaccccaggagttcaaggctgcagtgagctaccatcgagccacttcacttcagcctgggccgcagaataagaccctgtctgaaaaaaaaaatcttgtgatataataacagcttgtgcactcttcgatagctcagctggtagagcagagggctgtagactgcatagataataataacagtttgcgtttttgagtcaaagatgataccccagaatcattatcgaaaataatggttgatccattcacctgtgcctatgactgtgagccacattgtgaccaatctgtgagcaacatgggtgggaatgcagtttggggccatggaactcacttaacaggaagttccaatagcagtggatttaccatgttgcggctgtaggatcttggacaaatatttaatgacctctgtctctcagttctctcaataataaaacatccctccgagagttgctgtaaaggttaacatagggggagtcttgcaaatagtaggtgctaaaatcctgtcttgaaaaaaaaaaaaaaatatatatatatatatatatatatatatatatatgaagagatgagatcttcaattgtacagactgtccctgtacccattcatttgcatttcttttcctttacaataatacatatctatgatttcctttcattcccactgtcatcaatttagttagattactgggcagagatcaccagtggggctagagtaaaatgaaaataaatgtacattgactctaggtattcctaagtaatagcacagtttactgtgttctccctcataaatcctggtagctgaatgttgcctgcttttagcagttacgtttctgctcatctcaccctcaatgttcattaagaaaatagttattgaatggccaggctcactggctcacgcctgtaatctattacaggcgtgagccaccgtacccagccttggttatcatatttctaatttataatagtttttcttgttttcttattgttcattttttatagcatcctgttcttatattatggatatatatcttcaggtctcgctgaagaaataaagaggtgtatgtgtatatatgtgtgtgtgtattatctttatttttattttttgagatggaatcttactctgtcgcccaggctgtagtgcagtggcgcttttgggaggctgaggtggaaggatcacttaaggccaatatttggagaccagccagggcaacataacaagacccccatctctacaaaaaaattaaaaattagctggccatggtggtgagtgcctgtagtctcagctacttgggaggctgaggcaggaggattgcttgagcccaggaggttgaggggggaggtgagccatgattgagccactgcactccagcctaggtgacagagtgagaccccatctctaaaaaaaaagagagagagaaataaaatagttattgagcacctactgtatgtcaggtccaagaccctaaagatgtaaagatgaataaggtggtgaccctgccttccagtttccacaaaggtggggaatatggataaaagcagacaaagccattgccatgggataagggcagagaatagcatgtgcaaattatagaaggtgagggataatataccactttccagaaactgatggttcaatgaggctaaagcatggagttcaagaaaggaaaccagatgagattaactgcaatgtggttctcaaacttaaatgtgcataaaaactggccttgttgactgggcacagtgactcacaccggtaatccaagcactttgggaggtcgaggcgggcggatcgcttgaggtcaggagttcgaaactagcctggccaatgtggtgaaaccccatttctttttttttctttttcttttttttttttttttttttttgagacagagtctcgctgtcgtccaggctggagtgcagtggcgtgatctcggctcaccgcaagctccgcctcctgggttcacgccattctcctacctcagcctcccgagtagctgggactacaggcacccgctaccatgcccggctaatttttttgtatttttagtagagacggggtttcaccatgttagccaggatggtctcgatctcctgacctcgtgatccgtccgccttggcctcccaaagtgctgggattacaggcgtgagccaccgcgcccggcctgaaaccccatttctactaaaaatgcaaaaattagctgggtgtggtggtgcacacctatagtcccagctgctcaggaggttgaggcgggagaatcacttcaacctgggaggtggagatggagtaagccaagatcaagccactgcactccagcctgagtgacacagcgagactctgtctccaaaaaacaaacaaacgaacaaaaaactggccttgtttacatagtctcgcaagctccaagcctagagatcttgatggagcgggtcagagtgctgctgctcggagggctacactctgagaaccaccgatggagaagaagggcggggtcaacttgcagagctgtgctgggaggtgtgtgctgcagccttgagggggtgaagaacctttgagaggttttaagcctgcaagagatgtggtcacatttatattttagaaaaatcaccctgtgtgcaatatgaaaaatgaaacagagagggcaagactggagtcagggagagcagttaggaggctgctgcagaaacccaggcaagaaatcataaagacctgaaataaaacaatgccagtggggaacggggaagagaggccaaatccaaggggtatttaggagccagaattgagagggtgtgatgagtgttgatgggatacaggacaggatcctgagatggcttgcaggtcttcagctttgagtgacccatggaagcgaaggaagatgggaaggagggtgcctatcacacagagagaatgaaggtttgagaggcaagtgtagcttttgacattttgcttttgaaatgtctatgggacatcagaaataatctcaaaagaccacaagtcaggcagggcgcggtggctcacgcttgtaattccagcactttgggaggccgaggtgggcagatcacgaagtcaggagctcaagaccagcctggccaacatggtgaaaccccgtctctactaaaaattcaaaaattagctgggcatggtggcgggcacctgtaatcccagctacttgggaggctgaggcaggagaatcacttgaacctgggaggcggaggttgcaatgagctgggatcgagccatcgcactccagcctgggcaacaagagtaaaactctgcctaaaaaaaaaaaaaaaccatgagtcactggttaacagcctgagcggcagaaatctcacagttctgagtctgaatcctatctagcctggctctgaaactcacaatctggagctggggcttggtgcagtggctcaggcctgtaatcccagcactgtgggaggctgaggcaggtggattgcttgaggccaggagtttgagagcagcctggccaacatggtgaaaccccatctctactaaaaatacagttagccaggcatgatggtgtgcacctgtaatcccagctacttgggaggctgaggcacgacaatcgctggagcccaggaggcagacgttgcagtgagccgagattgtgctactgcactccagcctgggcaacacagcaacactgtctaaaaaaaaaaaaaaaaatgctgggcgcggtggtttacgtctgtaatcccacttttagaggctgaggtgggaggatcacctgaagccaggagctcaagaccagcctggccaacatggtaaaacccgccatcccctccctgccatgccccatctcccccaacactctcccaccctgtctctactaaaaatacaaaaattagccgggtgtggtggcacacacctataatctcagctacatgggaggctgaggcataagaattgcttgagcccggaaggtggaggttgcagtgagccaagatcgcaccactgcactccagcctgggtgacagagcaagactctctcttaaaaaaaaaaaaaaaaagaattttttttttaaatatagagatgggctttctgtgtttcccaggctatactcaagctcctgggctcaagctattctcctgcctctgccttcaaccagcctcaatcctccaattttcttattttttatatttttcaacaccttttaaattctacattctggccagctgcagtggctcatgcctataatccagcactttgagaggttgagatatgagacttgcttgaggccaggagtttgaggcttgcagtaagctagaatggcgccacggcacagcagcttgggagacagagcaagaccttgtctcaaaagaaaaagaatttaaatactacattctaggagatttcttcaaccttcaaattttgtattgaatttttaattttggcttttatttatttattttttttttgagacaggttctcactctgtcacccaggttggaatgcggtggcttgatctcagctcactgcaacctctgcctcctgggttcaagtgattctcctgcctcagcctcctgagtagctgggattgcaggcgtggtccagcatgcccagcttatttttgtattttcagtagagacggggtttcaccatattggccaggttggtctcaaactcctggcctcaagtgatccacatgcctcagcctcccaaggtgctgagattacaggtgtgagccactgcacccagccttggctatcatatttctaatttatgatagtttttcttgctttcttattgttcattttttatagcatcctgttcttatgttatggatatatatcttcaggtctcgctgaagaaataaagaggtgtatgtgtatatgtgtgtgtgtattatttttatttttattttttgagacggagtctcactctgttgcccaggctggagtgcagtggcacaatcccagctggctgcaacctctgcttcccaggttcaactgatcctcccacctcaatctcccaagtagctgggattacaggcacctgtcaccatgcccggctaatttttctttctttgtttcttttttttttttttttttttttttttgagatagagtctctgttgcccaggacggagtgcagtggtgtgatctcggctcactgcaagctccacctcctgggttcaagagattctcctgcctcagcctcccaagtagctgggattacaagcgtgtgccaccacacccagctaatttttgtatttttagtagagatggggtttcaccatgttgtccaggctgatctcaaactcctgacctcaaatgatccaccttcttcagcccgccaaagtgctgggattacatgcatgagccaccacaccagcaaaatttttgtatttttagtagagatagggtttcgccatatgtgtgtgtgttttaagtttttctgttttcatttctcttggcatatatacctcggaatggaattactgggtcatatgggagctctgtgttaaacacttgtgtcatatctaagaaaacttgctaatccaaaggtcataaagatgtatgtctatgttttcctctaaggccaacatggtgaaacactgtctctattaaaaaaataaaaactgggccgggcatggttgctcatgcctgtaatcccagcactttgggaggccaaggtgggtggatcacctgtggtcgggagttcgaggccagcctgatcaacatgcagaaaccccgtctctactaaaaatacaaaaaaattagcagggcatggtggcgcatgcctgtaatctcagctacttgggagctgaggcaggagaatcgcttgaacgcaggaggcagaggttgcggtgagccaagatcgtgccattgcactccagcctgggcaacaagagcaaaactcggtctcaaaaaaaaaaaaaaaaattagttgggcgtggtggcgcgcacctgtagtcccagctactccagaggctgaggcaggagaatggcttgaacccaggaggtggaggttgcagtgagctgagatcatgccactgcactccagcctggcaacagagcaacagagcaagactccatctaaaaacaaaaaaaagagttttctacttttcagtctaacaaatgttttataaacaaaggctttgttatattttgagttaatttttatagataatatgaggtgaggtttcaacttcattctattgtgtgtgggtatccagttgtcccaggaccattgtttgaaaagacttttttttctacactttctctcattgaattgtcttggcatatttgttaaaaatcagttgaccttggctgggcaccatggttcacacctgtaatcccagtattttgggaggccaaggcaagaagaccatttgagcccagaagttcaaaacccgcctgggcaatataggcacactccatttctaaaaataattattaaaaagattagctgggcaggccagacatggtggctcacgcctgtaatcccagcactttgggaggccaatgcaggtggatcacctgaggtcagaagttcaagaccagcctgaccaacatggagaaaccccatttctgctaaaaatacaaaattagtctggagtggtgactcatgcctgtaaatcccagctactagggaggctgaggcagaagaattgcttgaacccagaaggcggaggttgtggtgagccgagattgcgccattgcactccagcctgggcaacaagaatgaaactctgtctcaaaaaaaaaaagattagctgggcgtggtggcacatgcctgtggtcccagtgacttaggaggctgaggcagggggatcgggagacggaggctgcagtgagccttgatcactgcactccagcctgggtgacagagtgagaccctgtctcaaaaaagaaaaaaaatcagttgaccgtaatgtgagcactcatttctggactttcaattctattccattgatctatatgtcagtccttatgccagtgcccaggggctcaactactggtactgtgaattagattttgaatcaagaagcgtgagtcttccaattttgttcttatttttcaagattgttttgtctatttgaagttccttacaatttaatgtgaattttagaatcagcttgtccatttttgcaaaaaaggtagttgggattttgatagagattgtgttgagtctgtagatcaatttgggaggcattgctatgtgaagagtagtaagtgtttcaatccatgaacacacaatgtcttttcatgtatttaagtttaatttctttcaataatgttttgtagtttgcacttccttggttaaattcattcctaagttttttttggtgccattacaaatggaattgttttattaatttcatttttggattgttcatttctagtgtatagaaattcaactgagccaggtgtagtggtgcaccacctgtagtcccagctacttgggaggctgagtcaggaggattgcttgtggccatgtttgaggctatagtgcattataattgtgcctgtaaatgatcactgcattctagcctcggcaacatagtgcagtcttgtctcttaaaaaataaataaataaacaactgatttttgtacgttgatcttgtatcctccaactttgcaaaattaatttattactattaagactttgtggctgggcacggtggctcatgcctgtaatcccagcactttgggaggccaaggcgggcagatcacgaggtcaggagatcgagaccatcctggccaacacggtgaaaccccgtctctactaaaaatacaaaaaattagccaggcgcggtggcaggcacctgtagtcccagctacttgggaggctgaggcaggagaatggtgtgaacccgggtggcagagcttgcagtgagccaagatagcgccactgcagtccagcctgggcaaaagagtgagactccgtctcaaaaaaaaaaaaaaaaaaaagattttgctttattttgtgtttggtgtggatactttaggaaccaaaagataaataaataagaacaaggtctagcactttggtcaaatttattcctaagtgtgtgtttgtaaacgatattgtaaatgaattttcttagtttcattttcagcttgctaattgttactgtatagaaatacaatttatttatttatttactttttttttttttttttgagacagtctcgctctgttacccaggctggagtgcagtggtgtgatctcggctcactgcaacctctgcctcctgggttcaagcaattctcttgcctcagtctcccgaacagctgtgattacaggtgcgtgccgcaacccccagctaatttttgtatttttagtagagatgggttttcaccatgttggtcaggttagtctcaagatgttcttttttttttttttttttatcattttatttatttattttttaatttttatttttttttaaatttatttttttattgataattcttgggtgtttctcacagagggggatttggcagggtcatgggacaatagtggagggaaggtcagcagataaacaagtgaacaaaggtctctggttttcctaggcagaggaccctgcggccttccgcagtgtttgtgtccctgattacttgagattagggattggtgatgactcttaacgagcatgctgccttcaagcatctgtttaacaaagcacatcttgcaccgcccttaatccatttaaccctgagtggacacagcacatgtttcagagagcacagggttgggggtaaggtcacagatcaacaggatcccaaggcagaggaatttttcttagtgcagaacaaaatgaaaagtctcccatgtctacttctttctacacagacacggcaaccatccgatttctcaatcttttccccacctttcctgcctttctattccacaaagccgccattgtcatcctggcccattctcaatgagctgttgggcacacctcccagacggggtggtggccgggcagaggggctcctcacttcccagtaggggcggccgggcagaggcgcccctcacctcccggacggggcggctggccgggcgggggggctgaccccccccccaccggtcaggttagtctcgaactcctgacctcatgatctgctcacctaggcctcccaaagtgctgggattataggcatgagccactgcgccaggccaattttttttatatcactcttacacctgcaactttgctgaatttgtttacttgttctgacggttttgtggattccttagaatttcctacatacaagatcatgtcatatgcaaatacatatggttttatttcttcctttctaatttgtgtggcttttatttctttttcttgctaatttcctggctagaaatttaagtataatgttgaatagaggtggcaagagtgaatatccttgtcttcttcctgatcttaggagaaaaacttatagtctttcatcattaagtattacctgtggggctggatgcgatggctcaagcctataatcacagcactttgggaggccaaggcgggtggatcatttgaggtcaggtgttcaagaccagcctggccaagatggtgaaacccccatctctactaaaaacatctctactaaaaatataaaaacttggcggggtgcagtggctcacacctgtaatctcaccactttaggaggccgaggcgggcagatcacgaggtcaggagatcaagaccatcccggctaacacagtgaaacccatctctactaaaaatacaaaaaaaaaaaaaagaaaattagctaggtgtcgtggcacacgcctgtagtcccagctacttgggaggctgaggcaggagaatcgcttgaacccgggagacagaggttgcagtgagccgagatcacaccactgcgctccagcctgggcgacagagcaagactccatctcaaaaaaaaaaataaacgtaaattagacaggcatggtggtgcgcacctgtagtcctagctactcaggaggctgaggaaggagaattgcttgaacctgggaggcagaggttgcagtgagtcgagagcatgccactgcactccagccagggtgacagagtaagactctgtctcaaaaaaaaaaaaaaggatttatgggaagtaattaaggtcaaatgaggtcataaagctgggcactgatctaatagaattagtgtctttatgagacgagaacccagagagctccctagctttctctctgccacatgaggccacttcaagaaggcaagccaggtaataaagcccacgctgaggtaggaggtggaactggactccagagatggggcttggacaccagaccaaattgatgactagctgaaacagggacagggtgaaagcagctttccataagacacgctcaaccagtgcaccatgtcagcttaccatttccatggcagaacccagagttaccaccccaccgccttttttttgagacggagtctcactctgtcgcccaggctggagtgcagtggcacagtcttggctcactgcaagctccacctcccgggttcaagcgattctcctgccttagcctcccgagtagctgggattacaggcgcctgccaccgcgccaaactgatttttgtatttttagtagagacagtgtttcaccatcttggccaggctggtcttgaacttttgacctcatgatccacctgccttggcctcccaaagtgctggaattacaggcctgagccactgtgctcagcctaccacccctttcaatggcaacaacttgacaacccagaagttatcagcctttttctagaaacgtctgtatagtctgccccttaatttgcatgtaattaaaggtcaatgtaaatatgactgcagaactgccctgagctgctactctggtcacactacctacagggtagccctgctctgcaaggagcagtccctctgctgttgctataggccactgcttcaataaaagttggcatctaggccaggtgcagtgggtaatgcctgtaatcccagcactctaggaggctgaggcgggtggatcatttgaggccaggagtttgagaccagcctggtcaacatggtgaaaccccatctctactaaaaatacaaaaaaattagttgggtgttttggcgcacacctgcactcccagctactcaggaggttgaggcgggagaatcacttgaacccaggaggcagagtctgcagtgagccactgcactccagcctgggtgacagagtgagaccctgtcccgaaaaaaaaaaaagttggcctctaacaccttcggtttgcccttgaattatttcctgggtgaagccaagaaccctctcagtctaagccccagttttgtggcttacctgccctgcatcaacaccagaaacttaaccctttgggaatctcgatcttggactttctagcctctagaaccatgagaaaatgatctgtattattaggctacccagtctatgatattctgttgtagcctggggtgactaagacattgagcctgtatgacttgaattttgttacctgcttggccccttgatggcatttcagtttgtgactcttggtttacgtgatcacgaagccaaaactgtttaggaaggaagcaaaatcaagacagattaaaaataaaaataaaaaataaaaggctgggcaccgtggctcacgccctcccagcacgttgggaggcaaaggtaggcagataacttgaggtcagcagttcaagaccagcctggccaacatgatgaaaccacatctctactaaaactacaaaaattagccaggcgtggtggtgggcacctgtaatcccaggtatttgagagggaggcaggagaatcacttgaacctgggaggtggaggttgcagtgagccgagatcacaccactgcactccagcctgggtgacagagcaagactctctctcaaaaaataaaataaaataaaataaaataaaataaaataaaataaaataaagagccgagcacgctggctcacacctgtaatcccacacttcgggagaaagaggtggcaggattgcttgagcccaggagtttgataccagcctaggtaacatggcaaaatcccatctcaattttaaaaaaattttaaaaaagaataatagggctgggcacgatggctcatgcctgtaatcccagcactttgggaggccaagatggatggatcacctgaggttgggagtttgcgaccagcctgaccaacatggagaaaccccatctccactaaaaatacaatattagcaggtcgtggtggcacatacctgtaatcccagctactcggaaggctgaggcaggagaatcgcttgaacctgggaggtggaggttgtggtgagccaagatcgtgccattgcactccagcttgggcaacaagagtgaaattccatctaaaaaaaaaaaaagaaagaaagaaataaggtattttacataaagattaaaaagaaattaaaaccattatttgaagataatggcttaaacagaaactctgcaaatccttagaataagaaagttcaggccaggtgtagtggcttgtgcctgtaatcccaatgcattgggaggctaaggtcggaggattgcttgagcccaggagtttgagacaagccgggtcaacataatgagatcgcatctctacaaaaaattgaaaaatgagccaggtgtggcagtgcgtgcctgtagtcctggctactcaggaggctgaggtgggaaggtcacttgagcctgaagagttcaaggctacagtgttatgatcatgccactgcactgcactccagcctgggagacagagcaagaccctgagaccctgtctcaaaaaacaaaataaaaaaccctcactatattgaacacaacatcaatgttcaatagccactctccttctccttttctaataaaattccacttttttgtgttccatcccaggaccacgatttatctaaactggtcattctggatcaataagtttggctaaaaataaataatatcgaaattggtcacaggaaatctattcttttttttttttttttttttttttttcagacaaagtctcactctgtcgcccaggctggagtgcagcagcatgatcttggctcactgcaacctctgcctcccgggttcaagcaattctctgcctcagcctcccaagtagctgggattacaggtgcctgccaccacgcctggctagtttttgtatttttagtagagatggggtttcaccatcttggccaggctggtcttgaactcctgaccttgcgttctacctgccttggcttcccaaagtgctgggtctgtcacccaggctggagtgcaatggtgcaatcatggctcactgcagcctcaacctccctgggctcagatgattctcccaccttagcctctcaagtagctgggattaaaggcatatgccaccatgcccagctaatttttctattttttttgtagagacagggcatccctaccttgcccaggctggtcttcaactcctggtttcaaaggatcctcctgcttcagcctcccaaagcactgggtctattattccctttcatattcaaacttaattctgcattttcaaggccttgaattttcaagggcagctttttctgtccctgaacttaatcttcagctcctctcacctcctgggaggttggggggtggggaagaaaagtcccaaccctctaatcctgctttggtcttttgccgccagcccccatcctgaagctaccagtcaatttgtttgcatacaagaagatatcactttggagattctaagtgtatacgaggaaatgaggtcaaagaccaaatatatatatttcactatatcacacttcaaacttttgtttactgtttcccttctcctactctattataaacctttgagggtggggactgtgagttatttatctttatattcccagtgtcaagagtgtttagctataatgggaatgaatctcaaagtttcttgaataaatgacaagaagaatcatagttgcatgaactaaattcattattctcagtccttgaggtaaatgaatatattgatattatgtctgcttactctttttttgcgagagagagaaagaggagggagggagggaaggaaggaaaaaaggaaggaaggcgaaaagagtgaaagaaaagagagagaaaaagagagagaaagaaggaaggggagggaaggaaggaaaagaaggagggaagaagggaaagggagggagaggaagaaaagaaagaagaaggaaggaaagaaagaaagaagaaaaggagggaggaaggaacgaagaaagggaaagaaggagggagggagggaaatgaaggaaagaaagaaaaaagaaagaaagaaaaaagaaaagaaaaggagggaggaaggaaggagggagggaaggatggaagaaagggaaagaaggagggaggaagggacatgaagagaataaagaaagaaagaagaaaagaaaagaaaaaagaaaagaaaagggagggctctgcgggcggcggcggcgcggggagccggttgcaggccgagatgctgcagatggacctgatcgacgcgacgggggacactcccggggccgaggaggacgacgacgaggagcgcgcggcccggcggccgggagcggggccgcccaaggccgagtccggccaggagccggcgtcccgcggccagggccagagccaaggccagagccagggcccgggcagcggggacacgtaccggcccaagcggcccaccacgctcaacctctttccgcaggtgcagttgtctcaggacacactgaataataattctctgggcaaaaagtacagttggcaggatcgggtgtctcgatcatcctcacccctgaagacaggggagcagacaccaccgcatgaacccatttgcctgagcgatgagctgcccccccagagcagccccgcccccaccacagatcgaggcacctccaccaacagcccacgctgctggagctggtgagcctgcggccgtgcttcagagactacagtgacgagagtgactcggccatcgtctacgacaactgtgcctccgtctcctcgccctatgagtcagccatcggagaggaatatgaggaggcctcccggccccagcctcctgcctgcctctccaaggactccacgcctgacgaacccgacgtccatttctccaagaagttcctgaacatcttcatgagtggccgctcccgctcctccagtgccgagtccttcgggctgttctcctgcatcatcaaccgggaggagcaggagcagacccaccggaccatattcaggtttgtgcctcgacacgaagacgaacctgagctggaagtggatgaccctctgctagtggagctccaggctgaagactactggtacgaggcctacaacatgcgcactggtgcccggggcatctttactgcctattacgccatcgaggtcaccaaggagcccgagcacatggcagccctggctaaaaacagtgactgggtggaccagttccgggtgaagttcctgggctcagtccaggttccctatcacaagggcgatgtcgtcctctctgccgctatgcaaaagattgccaccacccgccggctaaccgtgcactttaacccgccctccagctgtgtcctggagatcagcgtgcggggtgtgaagataggtatcaaggccgatgactcccaggaggccaaggggaataaatgtagccactttttccagttaaaaaacatctctttccgcggatatcatccaaagaacaacaagtactttgggttcatcaccaagcacctcgccgaccaccggtttgcctgccacgtctttgtgtctgaagactccaccaaagccctggcagagtccgtggggagagcattccagcagtttcacaagcagtttgtggagtacacctgccccacagaaaatatctacctggagtagccgcgcagccccgccctctgcgtcccccggccctcaggccagtgccaggacagctggctgctgacaggatgtggcactgcttgaggaggggcacctgccaccgccaggggatgaggaagtgggggccgctggctcagggtaggggagggtggggcaatggggagaggcaaatgcagtttattgtaatatatgggattagattcatctatggagggcagagtgggctgcctggggattgggagggacagggcttggggagcaggtctctggcagagaaggatgtccgttccaggagcacacggccctgccccatcctgggccatacctcccctgccagggctcgggtgctctggctcctgccttgatgaagcccatgtcctgccttgatgaagcctgtgccacctgcaagtgcccgccctgcccctgtcccaacacccaccgaagagccctgagctcaggctgagcccagccacctcccaaggactttccagtgaggaaatggcaacacatggaagtgaagtccctgttctcagctctgtcatctgcagggcttctgggtggctcctgccactgacctcactggcatgctagcctgtggcaggcctaggacctcagcggggaggaggagctgctgcaaggccctatcccagcaggagagggaggcttcctgactgacacaggctagccccatcttggtcctgtcaccctggccccaactattaaagtgccatttcctgtcaaaaaaaaaaaaaaagaaaagaaaagaaaagggagggagggagggaggcaggaaggaaggaagagagggagggagggaagggaggaagaaagggaaagaaggagggagggagggaaatagaaagaaagaaggaaagaaaaagaaagaaagaaagagaaataaaataaaaattaaaaaaccataaggttaaagtaaaccctttttcttcatacagattaaaacacatgacttcaaattacagctttgcttcttaatagcttggtgatgtaggacgttatgtaacctctctgtgcctcagtttcctcatttataaaatagggcaataataatatctagcccataaggcattgtgaggattaaatgtgaaatgctgatcacaaatacctagcagcccaatagatactcactgtaataattattatttttataatttctgcaaaagtatggtgatgattcttgggttaacctaaaggcagattttcttttatttcttcctgtttcttttcttttccttgttcactttaaagaattaaaaagaaaattgattccagcattttggaataaaaatttgcatcaaaaagaatttattcattttattgacatacaaataaaatgtcatttgtttattcaataaacatttattaaatgtctggtaaatttcagacatcatgccaggcacagggatgacaatgacaataagatgtggtctctgccctcagggagctgatagtccaggagactgacaagtagacaggtgattacatgcaatgtaacaaaggctatgatgtcatacaagaagacaagtgggagtatgtgatgggagtatggttttgaccagttcctcctcttagatttatccctttttctttggctataaagcaaaagaattggtcctatttttttttcttaactttgcaaattaaaccataaattttaataactttataaagataaaaggcaagcggtcagattcagtggctcacacctataatcccaacactttgggaggccgaggcaggtggataacctgagatcaggagttcgagaccagcctggccaacatcgcgaaaccctgtctctactaaaaatacaaaaattagctaggtgtggtggcaggcacctgtaatcccagctactcaggaggctgaggcaggagaatcgcttgaacctgggaggcggagtttgcagtgagatgagatggagccattgctctccagcctgggctacagagcaagactctgtctcaaaacaaaacaaaacaaaacaaaacaaaaagatgagcaacttgaattatggaggacactagaaatagtgtttcctacagaatcagggcttcctaccaacatagtcacttctagggttttcgacctgaaaagttctgtggcatattgtttctttgctatccacttttttttccctatttttccccctctttctctcctctactttatctcctagagatctaggtagttcccaaaggaataatgctttacggagtctaatgttgatttattaggtaaaaacagaaaatgacttttttttttacccacaagttccataccaaaaaatgaatgtaaacttcttatgcagtttcacacattgaaaatgcaggttattttaattccattgcatttttcagaattctcaatcgcaatcctctgacaactgttgaagatccgtatctctttaaattactggcattaaaatatctgtaagtactatagtactcttgggagtcatgagatgatttatactctttttaaatttttcatcaaagattaagtattttgcatttaggctaaaatgtcataatttaaattttaactgagttattgaaaaacattattggcaaaggaaaggatgtgtaatggtcaagatagccagcaggggaaagagaacagtgttgaagaacccatatagatttggaacatgtagacacatggaggaatattacttaaccaagaaagcaaaggggaaaaggtgttcattattctaaaaaggaagaaaagagtaaataatcaagatgggtgaatgcaatatgaaaatgagaagtaagataatggtaaaaaaaaaaaacagtgtaagacctactcttgaatatcattaatttgatgatgcaaatcaactttaatttctttaataagagctctctggaattttgcggcaaataaactgttgaactggcttgttttatagggaagccaaaattgaagtaatcacatgtccttgaattatctttttaagtacagaattttttactggggttcatatcatgaatgtttcggctttcttcttcagagacgtgggaacaacgcaagtcccacttacaacacttaagaacattctcatgatgaccgttgaactggaaaaactgtaagttatttttttcttagacttattttcaccctgttgcgtttttaggtttgttttattattttcttaagtcaggtttattgagatataattttcatatactaacattcaccctttttaagtgtacaatttgatgagttttgacaaatgtatagttacataaccaccaccacattcccaatataaagcatttctgtcgcctcaaaaaggtccctcgtgtccctttgtagtcaatcacctcctcccaccgtcagcccctgttagctactaatctgatttcctatagttttgccttttccagaatatcttataaatgaaatcatatagcatgtagcctcttgtatttgacttctttcacttagcataattttttcttttttgagatggagtctcactgttgcccaggctgcagtgcagcggcatgacctagactcactgcaacctccacctcccaggttcaagtgattctcctgcctcagcctcctgagtagctgggattacaggcacatgccaccacgcctggctaatttttgtatttttagtagagacgaggtttcaccatgttggccaggctggtttggaagtcctgacctcaagtgatccgcccgccttggcttcccaaagtgctaggattacacgtgtgagccacctcacctggcctcacttatcatattattttttgaaattatgctgccatccatgttgctgcacccatcactacagctggccctccatatctgcaggttcctcatccatggattcaactgaacatggatggagaatacttgaaaaaaatgaaatatataaaataactataagacaataaaaacagtagaaaatttaaaatacagtataattatttacataccatttacactgtattaggtatttaaagtatacctgaggctatatacaaacattatgtcatttcatagaaaagacttcagcatctgtggactttggtgtcggcagggggtcctggagccaatcccctgcagacaccgagggacaactgttcactcctttttattgctcagtagtattccagttgtgtggaaaccccatctctactaaaaatacacaaattagccagatgtggtggcacacacctgtaatctcagctactcaggaggctgaggcacaagaagtgcttgaagctgggaggtggaggttgcagagtctcctttacacttgctgtcctccctccactgccgcctgacacactcctccccagcagtggcctcttcataggcaaatttaaggagcaccttttagtccttgtcctgcttgacttggccctgatgtttgaaattcttgataaatctttcttccggaaacacactctttctatgcttccaggaaatctttttcttggttctccagacaacttcttagactccttgaccaattccttcttgttgccaacaatggaaacaaaccagccctacctaagcaaagcacattaaaactcactagaaagatacaggggagggggcgcccactaaaccactaaagagacaggaggtggggagctgtaggaccaggtttgggaacctgcaagaatcaagaccagagcccctgaaatagcaagaagctggaagcacaggaactgtcagagccagatggctgtcactgcagtcagcgcctctgattgtttgtttttgagatggagtctcgctctgtcgcccaggctggagtgcagtggcatgatctcggctcactgcaacctccacctcccgggttcaagcaattctcctgcctcagcctcccgagtaactgggactacaggagcctgccaccatgcccgactagttctttatatttttaatagagatggggtttcaccatgttcgtctcaaactcctgaccccaggcgatccacttgcctcggcctcccaaagtgctgggattacaggcgtgagccaccatgcctggccagtttttgtatatttagtagagactggttttgccatgttggccaggttggtctcaaactcctgacctcaagtgatccatccacctccgcctcccaaagtgctgggattataggcatgaaccactgtgcccagccacctctgatagttttcatcgtcctcgggccactggctcccaaatcacggttccagacaaaagcttacaagtagtccagctttggccaggctcagtgtgatggttaatactgagtgccaacttgattggattgaaggatacaaaatattgatcttgggtgtgtccgtgagggtgttcccaaaggagattaacatttgagtcagcgggctgagaaaggcagacccacccttaatctgggtgggcacaagctaatcagctgccagcaaggctagaatataagcaggcagaaaaatgtgagagactggcttagcctcccagccaacatcttcctcccgtgctggatgcttcttaccctccaacatcggactccaagttcttcagttttggaactcagactggctctccttgctcctcagcctgcagacggcctattgtgggaccttgtgatcctgtgagttaatacttaataaactcctgtatatattccattaattctgtccctctagagaaccctgactaatacgctcagtgactcacacctgtaatcccagtactttgggaggctcaggcaggaggatggcttgagccccagagtcttcttcttctccttctccttgtccttctcttcccttcccctttctcctcttcctcttccttctcttcctcttcctcttcctctccttcctcttcctcttcttcctcttgtttgtttgagaaaggttctccctctgttgccaaggctggattgtagtggcacaattgtgactcactgcttctcagcctcctgagagcccaggagtttgaggctgcagtgagctatgatcacactaccacactcctgcctgggtgacagagcaagaccctgtctcaaaaaacaaacaaaaaactctggtatgatagaggtgaattgtctgttttatcctgataattctgcttaccttagtcccgtggttctcaactgggccaattttgctccccaagtgacatttggcaatatctgggcagaggtcaaggacgctgcttaacatctttttttttttttttttgagacacagttttgctcttgttgcccaggctggagtgaaatggcacgatctcgcctcactgcaacctctgtctcccgggttcaagcgattctcctgcctcagcctcccgagtagctgggattatgggcatgcaccatcacgcctggctaattttgtatttttagtagagatggggtttctccatgttggtcaggctggtctcaaactcccaaccttaggtgatcagcccacctcagcctcccaaagtgctgggattacaggtgtgagccacctcacctgtcctgcttaacgtcttaaaacacacaggacaattcccccataaaaaatgatgaccagccgaaaatgtcaacagtatcaaggtgaagaaattgccataaaggcttggtaaacagggatggtatgacgacactattgataggccacattaaaatacttagggccatatccattatccctgtttttatgatttcttctttgtccccatgcagtttcaggggcaaaataagggagtaagtcagaggtggttccaaatagacatctgggaatcttagggtgtaatatggccctcatggaggcccttgctgagcttagggcctgattctggaatcctagcattgccaagagaggcaggctggcaggtgagaagacaaataatgggagagcccacatatgttggaattcatttgatggtatctaagctggggtgattgtccccactagcattacatgactatggatccagttatttggagaaatccatttcctccacagggaatatatactacattagaaccaaagatggaatccttagtaaatggaatcatttggcaaaattcagttgtctgaaatttttgcataaaattctcttttttattttcattgagccaaataaataaagtatcaggtatttactggggtcaccattctttgattcattgattttttttttcagacaggatctcgctgtcacccacgttggagtgcagtggcataatctcagttcactgcaacctccacttcctgggcttaagtgattctcccacctcagcctcccaagtagctggaaatacaggcgcgtgccaccatgcctccattttctttctttttttttttttttaattgatcattcttgggtgtttctcgcagagggggatttggcagggtcataggacaatagtggagggaaggtcggcagataaacaagtgaacaaaggtctctggttttcctaggcagaggaccctgcgccttccgcagtctttgtgtccctgggtacttgagattagggagtggtgatgactcttaaggagcatgctgccttcaagcatctgtttaacaaagcacatcttgcaccgcccttaatccatttaaccctgagtggacacagcacatgtttcagagagcacagggttgggggtaaggtcacagatcaacaggatcccaaggcagaagaatttttcttagtatagaacaaaatgaaaagtctcccatgtctacccgcctctacacagacacggcaaccatccgacttctcagtcctttccccacctttcccccctttctactccacaaaaccgccattgtcatcatggcccgttctcaatgagctgttgggtacacctcccggacggggcggctggccgggcggggggctgacccccccacctccctcccggacggggtggctgccgggcggagacgctcctcaattcccagacggggcgactgccgggcggaggggctcctcacttctcagacagggcggttgccgggcggaggggctcctcacttctcagacagggcggttgccgggcggagggtctcctcacttctcagatggggcggccgggcagagacgctcctcacctcccagatggggtcacggccgggcagaggcgctcctcacatcccagacggggcggcggggcagaggcgctccccacatctcagacgatgggcggccgggcagagacgctcctcacttcctagatgggatggcggccgggcagagacgctcctccctttccagactgggcagccaggcagagacgctcctcacttcccagacggggtggcggccgggcagaggctgcaatctcggcactttgggaggccaaggcaggcggctgggaggtggaggttgtagccagccgagatcacgccactgcactccagcctgggcaccactgagcactgagtgaacgagactccgtctgcaatcccggcacctcgggaggccgaggctggcggatcactcgcggttaggagctggagaccagcccggccaacgcagcgaaaccccgtctccaccaaaaaaatacgaaaaccagtcaggcgtggcggcgcgtgcctgcaatcgcaggcacttggtaggctgaggcaggagaatcaggcagggaggttgcagtgagccgagatggcggcagtacagtccagcatcagagggagaccgtggaaagagagggagagggagaccgtggggagagggagagggagggggaggggagggggagagggagagggagaggtgcattttcttataaacccaatttcctctttagtgcaactctaccatttgaaaggaacctttctattgtaatttacaagctgtgaataaccgctatgtaattctttccaaggattaataaactgagagaggatttgaaccaacagaggtaggggaagattagaagggggatgcaagtggccacagatcttagaggcggccagcagagggcgctgctccaaggtgaaggtcgcaccctgagaggccatccttttttgtaggaccagactggggtgtaaggacagtgcctcatcctcacaacgacagacccgtgttctgggtgtggatttgcctcccttgcctgcgggacttctgctagcactgccgttcctagacttagaccatgctagaatgagtccaggaaccgaggagaggagatgggagtggctcctcccactgtggcccctaataattcacatgaagaatttttgctttccttgccagggacccgggactcagtgggtccagaggtcctagtgccaaaggaagaaatgtgtagatcaggaaatactattatggttttattcaactggaagccgaggctggccatttattgtatttatttatttatttatctatctatttatttatttatttagagacagaatctcactcttgtttcccaggctcccaggctcaagagatcctcctaccttagcctcctgagtagctggtactacagtcgcatgccaccttgcccagctaattttttttttttttgagacgcagtctcattttgttgcccaggctagagtgcagtggcgcggtcttggctcactgcaacctccacctcctgggttgaagcgattctcctgtctcagcctccggagtagctgggattacaggcatgtgccaccgcgcctggcaatttttttttttttagtagaggcggggtttcaccatgttggccaggctggtctcaactcctgaccttgtgatccgcctgcctcagcctcccaaagcactgggattgcagacataagccaccgcgcctgttttttttgttttgttttgttttctgacagagtctctgtcacccaggctggagtgcagtggtgtgatctcagctcactgcaacctctgcctcctgggttcaagcgattctcctgccttagcctcccaagtagctgggattataggcgcacaccactatgcccagctaatttttgtatttttagtagaggtggggtttcaccatgttggccaggctggtctcaaactcccgacttcaggtgatccacccacctcggcctcccaaagtgctgggattataggtgtgagccatcaagcccagccctgcccagctaatttttacactatgggcaagtatgctgcccaagagtgctctggaactcctgggctcaagtgatcttccttcctcggcctctcaatgtgcttggattacaagcatgagccaccttgcccagccgaagctggccatttaaagttcctcatgctgctgaatcaataaggatggaaggcggctactattatgggctaagtgtttgcatcctccccaaattctttttttttttttttttttgagatggagttttgctcttgttgcccaggctagagtgcagtggcgcgatctctgctcactgcaacctccacctttcaggttcaagtgattctcctgcctcagcctaccgagttagctgggattacaggcatacgccaccacacccggctaattttgtatttttagtagagatggggtttctccatgttggtcaggctggtctcaaactcccgacctcaggtaatctgctgacttcagcctcccaaagtgctgggattaccagcatgagccaccgcgcccggcccccaaattgttttttgttttttttttttgagacggagtctcgctctgtcacccaggctggagtgcagtggcatgatcttggctcactgcgagctctgcttcctgggttcacgccattctcctgcctcagcctcccgaatagctgggactacaggcgcccgccaccacgcctggctaattttttgtatttttagtggacacggggtttcaccgtgttagccaggatggtctcgatctcctgacctcgtgatctgcctgcctcagcctcccaaagtgctgggattacaggggtgagccaccacacccggcctcggcccccaaattcttatgttgaagccctcacctccatgtgatggtattagaaggtggggcctttgggacgtaattaggctgacagtgccccatgatgggatgagtgtcttaaaagaaaagaccaggtggtctggctagtggctcacccctgaaatcgcagcactttgggaggccaaggtgggtggatcacttgagatcaggcgtttgagaccagcctgggcaatatggtgaaaagccatctctactaaaaatacaaaaattagctgggcgtggtggcgcaagtctgtaatcccagctacttgggaggctgaggtgggagaatcgcttgaacccaggaggtggaggttgcagtgagcccagatcatgtcattgcactccagcctccaacctggacagagagagcatctggagagtctctgtctcaaaacaaaaagaaaaaaaaaagaagagaccagagagcctttcttctctttgtccaccaagtgaagatatggcaagaaggcagccatctgcaagctaggaaaagagcccttgccagcacccaattgtgctatcaccctgatatgggacttcccagcctccagaactgtgagtaatcaatgtctattgtttaagccacccagtatgtaatactgagctgactaaaaccatcaccgaactagcctctttacatatgattagcaagaggaaaatggctctgttacttaatggaggaaggaggctatgtctgaaagccaaaaattcactggggacacatcttagcaggctcttgaccctaagacctggttaatggaaaagtagagcaacccaataaaaacaagaccaccaagaagtcaggtcttatggaataaagtattgagtgtccctatgaggcacagaacccttcgaaaggggattggaagaagtggtgaagaaggcggctatgattatcaacttagacttcatcgccatttgtagaaggaggcttctaacagctatgttttatgttaattggctcttttctcttcttttttctttcaaccttatattaagagcactggcagaagctagcggttttggcatcctgtaattattagctgtataaccttggccaagtaactcaacctttctgtgcctcagttactcatctgtaaaacagggtaataagtctcaacctcgtacttatgttgttataaagatttaacactaggctgggcatggtggctcacacctgtaatcccagcactttgggaggccgaggagggtggatcacctgaggtcaggagttcaagaccagactggccaacatggcaaaaccctgtctctactaaaaatacaaaaaattagctgggtgtggtggcacgtgattgtaatcccagttactcgggaggctgaggcaggagaattgcttgaactaaacctgggaggcggaggttgcagtgagccaagatcgtgccactgcactctagcccaggcaacagagttagactctgtctcaaaaaaaaaaaaaaaaaaaaagtaacactttgaacaaaaaagaaaaaaataataaaatttaaaaaagatttaacaattgggccaggcatagtggctcatgcctgtaataccagcactttgggagcctgaagagggaggattacttgaacccaggagttccagaccagcctggacaacaaagcaagactttgtttctacttaaaaaaaaaaaaaaaacaccaaagtcaggtgtggtggtacacacctgtgatcccagctacttgggaggctgagatgggaggatcccttgagccttggaggttgaggctgcaatgagccatgatcataccactgcactccagcctaggcgacagagtgaggcccatgtcaaaaaaaaaaaaaatgatccccaacatttagcagcttaaaacaaaaaacatttattatatcacactttctgtgggccaggaatctgggagggacttagctgggtggttctgctcagttctcttgggatgtttcagtcaagcagtggcctggggctgcactcttatctgaagactcaattgggagaaaatatgcattcaaggtcactcattggttgttggcaggctgtagttccttactgaatattggttgaagacttcattggcttactacctggacttctccatagactgcttgaatgtcctccccacatagctagagtgaatgactaaaaaagagagagaacacacacagcccaggtaagagttcagtctttctaagtcattatatgaaagagattcttttttttttgagatggagtctcgctctgtcgccaggctggagtgcagcggcacgatcccagctcactgcaacctctgcctcctgggttcaagtgattctcctgcctcagcctcccaagtagctgggattacaggcgtgtgccactatgcccagctactttctgtatttttaatagagatggggttttaccatgttggccaggatggtcttgatctcttgaccttgtgatccacctgccttggcctcccaaagtgctgggattacaggcgtgagccaccacgcctggccgaaaaagattcttgcacacacatgtttatagtagcactattcacaattgtaaaaatgtggaaccagtccaaatgcccatcaatcaatgagtggctaaagaaactgtggtatagatatacagtggaatactactcagtcataaaaaggaatgaattaatggcatttgcagcaacctggacaggattggagactattattctttttttttttttttttttttttttgagatagagtctcacttggtcacccaggctggagtgcagttgtgcaatcttggctcactgcaagctctgcctcctgggttcacaccattctcctgcctcagcctcccaagtagctgagactacaggcgcctgccaccacgcccggctaattttttttttgtatttttagtagagaccgggtttcaccatgttagcctggatggtctcgatctcctgacctcgtgatccgcccacctcagcctcccaaagtgctgggattacaggcatgagccaccgcacccggcctattttttttttttttttttttttttttttttttttactaaccaggggtttaacataaatacaaccagcatagaaagacccaaaactatacagaaaccaaaaccagaatgccatgtggtggaggcaaagggcagaatttctgacccctttggctcagctgcccttccccacaaataaaaaccaacaaagaggacaaatcaggacaataaagaagattcatgctaagctgtggcagaggggggaaggtatgatcgggtgggggtgggataaggaatggccatggaagataactgggtcaggttggaccctgggctgggagggggagggcaaggcccctcaccacaacttaagccaaacctaagctgcccccaggtgccataggtccctgtcccagcagggaggctgatgggcctgggcccatgcccctccccacctttgggggtcagatagtggccacccaggtttgctgggttggggcctgatacaggctctgcatgcccattcgggctgcctgtggagagagaatggagtcactgtttaaccatgctacctgcctcagccccagcagaccacaggaggttggccccagactcactgagtgcctgcagcagccctacagacacagcatccttggccacctcatgcccatcccggccatctagggtcagcacaacccagatgaggccgctgaagggcaccggatgcccaggaatcaccacctggtaccagaagcggtgccagccagcaggtcctatgcccaaacacttggtgaggaacacagggctgcccagcttcattcgttggcacagcaactgcagggtagcccgagccccttgggaccctaacttgtcccttgccaaggccaactggctgccctctggctgtggggaccgcaaggagggacccacaagctgctggcgaagtcgctgcttcagttctggcttgagccactccacagccacctgctctccacagaggtgtggctgcccttcctccagggcctttttggccatggcagcggtccagtgcgagctgaatttgagcagagcgatctgcccgggcgcaggtccggggctgggcagcagccgcgcctcctgcaggccgggacccagcggctgcagcgcgggcagcagcgcgggcagcagcgcggtgcgggtcagattcggcggcaggcagtcaacgctcagctcacacttcccggtgctgcggcacacgagcagcgggcaggacggccgcagcgggtggttgtgcagcgggcgatggcggcctgcgcgccgcgccgcgagctgcagcgggcatatgcgaagccgcggttcaggccgctgaaggtcatcatcaggcggaactcgtagaggcggcccacgcgctggaacagcaggatagctggtgctcatacacttcctgaggcagccgcccgatgaacacctctgacccagccggcggcgggctgcccacccagcctgggggtggcccgccatacttcctctgcccgttcacctgcaccaggcgatgcctgtctccctgacccacgcctccagcgccgccttcaccctctcacaccacagctcacaatcccgcttggactgcatggctctctattctcttttttttttttttttttttgagacgtagtttcactcttgttctccaggctggagtgcaatggcgggatcttggctcaccgcaacctccgcctcccgggttcaagcgattctcctgcctcagcctcccaagtagctgggattacaggcatgcgccaccatgcctggctaattttgtatttttagtagagacggggtttctccctgttggtcaggctggtctcaaactcccgacctcaggtgatccacccacctcggcctcgcatagtgctgggattacaggcatgagccaccgtgccccgtctatggagactattattctcagcgaagtaactcaggaatggaaaaccaaacatcgtacgttctcactcataaatgggagctaagctaggaggatgcaaaggcataagaatgacacagtggactttggggaatcagggggaaaggatgggaagggggtgagggataaaagactattaattgggtgcagtctatattgcttgggtgatgggtgcacacaaatttcacaaatcaccactaaagaacttacttacgtaaccaaacaccagctgttccccaatatcctatggaaataaaaatttttttttagaaaaagagttcggtctttctgtaacctaatcttggaagtgtatattatcacttcttccataggctatcagtctcccagaccaaccctgctacagggtaggggagactacatggtatgtgaataccagaaagtgggggccactggggactggctatttggaggatggttactacaaactatatttgtaattttttttttcttgagatggagtcttgctctgttgcccaggctggagtgcaatggcacgatctcagctcgctgcaacatccacctcctgcgttcaagtgattctcctgcctcagcctcccgagtagctgggattacaggcacgcaccaccacacccagctaattttttgtatttttaatagagatggggtttctccatgttggtcaggctggtctcaaacgcctgacctcaggtgatctgcccgcctcggcctcccagagtgctgggattacaggcccgagccatggtgcctggctatatttgtaatattttaaccactaaaaaaaaaaaaaagaagaagaagaagaagaaaaagaaacaagtatgggaaaatattaagatctgataaaaccgggttatacttatgcaggtattcattacattattctccataactttttaaatgtttaataataaaagtaaaaatattttccccttaaaaatgtgcagagcatacctcaaataatgttgacaaagaatcctaaagacaattattattattattattttttgagacaggttcttgctctgttgcccaggctggagtgcagtgatgccacctgagctcactgtaaactccgtctcccgagtttaagcaattctcctgtctcagcctcctgagcagctgggactacaggcgagcaccatcatacctggttaatttttatattttcagtagagacggggtttcatcatattgcacaggctggtcttgaactcctggcctcaagtgatccacccaccttggcctcccaaagtgctagcattacaggcatgagccactgcaccgggcctctcaaactcctgacctcaggtgatccacctgccttggcctcccaaagtcctggcattataggcgtgagccactgcgcccggccgatcttccttcctttctcccttcccctcttcttcttcttcttcttcttcttttttaattaatagagatgggattttgccatgttgcttaggctggtttcaaactcctgggctcaagctatctgctcgcttcagcttcccaaagtcctgggattaagggcgtgagccactgcgcctggccccagtaaggatttaaaagctcaggaattattagtcagcttccttttttgttcatcctgttgtttgttcatttcagtctattccctttttataatttccttcttcataaggactatttctccttgtacttttgtgagaattcccgtaacttgtaatcccagctacttgggaggctgaggcaggagaatcacttgaaccgggaggcggaggttgcggtgagccgagatcaagccattgcactccagcctgggcaacaagagcaaaactcggtcttggaaaaaaaaaaaaaagaaaagaaaagaaaaaagaaaggaaggaagatcctcattggacagagcaaaaagcagaattgatggcactgaaaatgaaatcagcagctgatgtacaagttccagaatgtctcctagagtaacaaggaaatccgggtgtggtagtttatgcctgtcatccaagcactttgtgaggccaaggaggttagttagcttgagcccaggagttggagaccagcctggccaacatggtgaaaccccatctctacagaaaatataaaagttagctgggtttggtggtgggtacctgtagtcccagctactctggaggcgaaggagggaggatcacctgagtcccgcgaggtcaaggccacagtgagccttgatagagttttgccactgcactccagcctaagcaacagtgagaccctgtctcaataaacaaacaaacaaacaaataaataattgtagagacagaagataaaatggagcccggtgcagtggctcacgcctgtaatcccagaactttgggaggctgaggtgggcagattacttggcccaggagtttgagaccagtctgcccaacatggtgaaaccccgtctctactaaaaatacaaaaattagccaggcatggtggtgtgtgcctataatcccagctacttgagaggctgagacaggagaatcgattgaacccaggaggtggaggttgcagtgagctgagatcacaccactgcactccagcctgggtgacaaagccagactctgtctcaaaaaaaaaaaaaaaaaaaaaaggctgagcacggtggctcatgcctgtaatcccagcactttgagaggctgagccgggcagatcacctaaggtcgggagtttgagaccagcctgaccaacatggagaaaccccgtctctgccaaaaatacagtattagcaggtcgtggtggcacatgcctgtaatcccagctacctgggaggctgaggcaggagaatcgcttgaacctgggaggtggaggttgcagtgagccgagattgtgccactgcactccagactgggcaacaagagtgagactctgtctcaaaaaaaaaaaaaaaaaaaagagagagagacagggtttcaccaggttggccaggctggtcttggactcctgacctcaagtgatctgcccgcctcagcctcccaaagtgctgggattactggtgtgggccactgcatctggctcccaccatctctattaaaataagataaaataaacataaaataatgaaccgacaaaataataatacaattcattgtaagtaaaatgctatcctgagttctgtgagtcattctggataattcaaattctctagaattaccacctcagctgactttttttttttttttttgtagagaccaggctggtcttgaattcttgagctcaagtgatccgcttccctcagtctcccaaagtgctggaattacatgtgtgagccactgagcctggcctacaaattctttattatacaacacacagtagatgctcaataaatatttgctaagcagaaacatacactcaaaataccagaaattatcaaggaagttgccagttggtctcttgggttcttcctcccgacaggtatacacacctattgtaaagatgaacacattaggctgtgagaaaccaatactgttaaacattccaatcaggtgacaaactccctgggctctggtttatattaccaagcaacctgatgataacttggcttcctgtgtggcttgtttatagaaagagaatgctacccaggctgacgtgagttgcatttctgagttgatttctcactgtaaattaataaactggcattctggctacatagatcagtctctttgaactctttgtaccttccaccattagtgtgatttctaaggctgcaagccagacactgcccaagacccagcactggactctggtgagttcttccagctgttgccaccccaggaggctctgggagcccctgggaaccatccagcttgctctctgtctctacatttcagggtgtgggtttcagggcattcacaacattcctgcaacagaagagttttgggaacacccccagcaggatgtgggtgatttgaatgtatgtcagagatgtggttgtaactgagaaatcttaagcctagtgaattttattccacttgacttaaataaagagcacgtgaaagaaggggatctgaggacatctatgaacagggccccgagggcatgaacttactagtgtttatatgactagtgtttatctgggcctgtctagtctggagaacctgactctggtgtacccaagctttgcagtggctgtagaggtttgctcttttggagggagaagataattcattcctccaacacctgaatgagggtagattaacccacctccttcagctgcaatttggcaaatttctcttctttgatttaatgctcaacggacaaatttcctttcttcttcttcttcttcttcttcttcttcttcttcttcttcttcttcttcttcttcttcttcttcttcctcttcttctttttttctcctcttcttcttcttcttctcctccttctccttcttctccttcttcttttctcttccttctcctcctccttcctcctcctcctcttcctactcttcttcctcttcctctcctcctcctcttcctcctcctcttccttcttcttcttctttctttttttttcggttttgagacagggtctccgtcacccaggctggagtgcagtggcacgatctcggctcactgcaacctccacctcctaggctcaagcgatcctcccacctcagcttcccatgtggctgggaccaaggcgtgagctaccatgcccggctaatttttgtattttttgtagagacagggtctctccatgttgctcaggctggtcttgaactcctgagctcaagagatcctcctgtctcaggctcccaaagtcctgggattacaagcacgagccaccatgcccggcctcaacaggcaaccttctgattaataattagacctctgtgccggccgtcgtggctgatgcctgtaattccagcactttggaaggccaaggcgggtggatggcttgaggtcgggcgtttgagaccagcctggccaacacggtgaaaccccgtctctgctaaatatacaaaaattagcctggcatggtggcgtatgcctgtaatcccagctacttgggaggctgaggcacgagaatcgcttgaacccgggaggcagaggttacagtgagctgtcatatataatgaaacagttttactaaacttaggaagcagtgacttggtgtctctagaaattgcctaacatacacattccaggatacattctctgtcatctggaatctcctcccttccacaaacccacgctgtcttaagcactattttcctatttgttgttgacctaatctagaaaaaagcggccatcactctttctcccccactcagtccctcagtcccgaaacacccttattctccgcacttgtcaccccaccctctgctgcccccaccgcagcgcgcaaacgcacacgagtttaaagtttaggctgtgatgctatcctcgcccgcagatcacaggacagacattctcggggacaactttgcgaggccatgtgctcgtcccccttaggaaggaagagggagaaatccctgcggctcggttttgttccaatggtctgctcagcgagtgattcccgtttccccaaaggctgcccctcattagcatgaacggggacgcgggtgtggagaaggggttagaggagagaaagcaagcaaaagcccaggctcacttttagagcctgggaaccctgtctgcaaaaatgacagctagagctttctggctcctctgtttaatcgtcggatcatcccccgaagctccggtggagagaaaaagtaagatcggtgtagtgcggagccctgggagcggagcggggatctggggagggggcgcccaggcctcagccgccggccgacaaccgggccaccttccgtgaggccgcacacgctcccacaggcccgcgcctggcgcaagccgagaaccgcgcgtcgccgcgccgcgggcccgcgacggaggaagccccgagacgcgcgcgctcacgggccctacgcttccccgccgcccggccgcgcgcgcgcgccgccgagggccccgccggccctgcccaccccaaccggccgcgcgccgttgtgccggcccccggctcgccgcccgcgccgccgccgcgcctcagcttcagattcggcctcagtcagccgcgcagggacgcggagcccggcgccgagctctgcgcttgcgcttgccgggcgggcatggacgggcgagaggcgttctgcaagcgcgaaatcggtgagcccggccgccgcgccgccgccccgcgagcctttccgagtcccggagaatcctgcacgcgagatcccagggcgcccgacccatgcgggccgtttcgctgttgctaaaaaccaacgcccagggactgggagaggaactggggttcccaaactgttttttggaagcagcgatgaacgggatagtgcatgacgtggacgtgctgggcgcgggcatctggctggtgaccctgctggtggatcgggacgggctgtacaagatgaaccgcctgtacctcactcacccccgacgtcttcttcttccgagtccacatgttagtcctggactcctccagctgcaataaaccgtgtccagagtttaaacctggtattgaaactgagctgaatgacgctgcatatgtactttataccaccgtttgtaacgtgggtgccacagcccgggctgtgggtcgtccagtctttttttgggacggatgggggacagtattgtaacatgattaggatttagacgacaggtattatttccgccactgtgatttaagcaccgtcagccccacccccacgggtgagaacggcagctgttggcacaaagcgggctgtcaataaatagatgttgacaaatggagtgagcgaccaccaaacaccattgccagaagggactgtacagaactgagtttagaaaagctgcttttttgggggagtgtgtggagggttggtagcggggaatacccactcccacatcttttttttttttttttttttttttttagacagagtctcgctctgttgcccaggctggagtgcaatggcgccatctcagctcactgcaacctccgtcccccaggttcaagccattctcctgccctcagcctcccaagtagctgggattacaggctgagccactgcgcccagccccactcccacatctttctaggcatgtgctctgggaaatcctgatacaatgtgataaggacctttgttctgtaatgtgggctggttacgtattgctttcccttccccacaccccgtgctactttttgtatttttagtacagatggggtttcaccatgttggctaggctggtctcaaactcctgacctcaagtaatctgcccgcctcggcctcccaaagtgctaggattaaaggcgtgagccactgcactggcctggttgggttggttatcttctaaaggtcgctagactgtttccaccttgcctgtagactaaatatcagtttcaacttgtgcagcaagatagtagattgcagcttaggtatttcttaaaggccttatattttctgtttcatggcatttaaaagacgctatgaattaatgttctggttattttgtccaggcagcaggtatattgtgatgggccacatctaccataagagagggcagcttcctacagctctgctccaggtcctgagaggccatctctgtccaggggatggactgctgaggagcagcagcagctatgtgaaaaggtttaacccaaaaagggaagggcaaattcaaggtgcaattcatacccaatgcatttgaaacaaccatcctggcatttctggatcacaagagacatcggcaacaagacatgaaaggtctatcttcatgtaatgggtcctcctttagaagagagcccaaagctactctatgaatgacctgcatagttacaactgtaatctcgaaggtgtcactttgttatttacaagatgcttcttaaatgggctgctcctgagctcagtgtcaaggtgattcaactgttgtgccagacagtgatttacacagctcagataactgacctgtctagttaacagatcactgcttcatgtttttaaatattttaatttaatacattctttagtagaaatagtccacaaaacattttcctgaatttaaatacacaacttttatatcatgtatcaaacctgattttatattcaaacctgatttatattcaaaacttatatgtgaagattaaattcttcacataacagtaagcgcactagtcaaaagacatttacctatgaaacgtcatttagatcaaacacaagggtcaaagcccaggacaaggattaaaattttacacttaaaaagtaccaagccgggcgcggtggctcacacctgtaatcccagcactttgagaggccgaggcgggtggatcacctgaggtccggagttcgagaccaggctgaccaacatggaaaaaccctgtctctactaaaaatacaaaaattagccgggtgtggtggcacatgcctgtaatcccagctgagggaggctgaggcaggagaatcacttgaacccaggaggcagaggttgtggtgagccgagatcgcgccagcctgggcaacaagagcaaaactccgtctcaaaaacaaacaaagtgtacaaaagggccagtgtgcggatgggtggattaaaaaaataaattttaaaaaagtgccaaagggcttacttcaggcaaaagtgttcctgatgtaccaaagagtaagatatagtttattttcatgcctccctgctcctaataatgtatgttttgtgctgaactggcagctatcccaatgtgaactgtattctgagtgtatctgatatcatttttctattaagaccaagtataatgtttgcttgtaaagcaataaatcttgctttgaaattagaccttggatgcacctgtttatttttgttttgttttgttttagcctttgagccctaaaggtttgagaaaaagcctttctcaaattcattccccaaaccttggaaccaatattaaccaatgacagctcacaagcaagtgaattctaaacatttttcagttggttttaaaaaggtttaatcactagctaaattaaatattgattttatacctgagtccacaaagacatgagagtattttttcagaagataaggctgtacttcagtttataagaagtacggtgaacagagacaccactaatgcatagatgaagatgactgcctaaagagagacaggggaaggaatttcactggagagagagcagcctatttggcctcacggtgatgcactcaggaaggtcagaatgtgtcctgacgctgtccatggcacccagtagtagcactgtacacataaaggacatccaggacgggacgctagggaatcacaggagccaagaggcaacagcctaacattacaatacctgatactattatttgttccaattatggggcagacaggtaataaagagttgagaggttctgagtgttctatggtaaagcactactgagagatttctagagtattttccaaaaatgagttttgtccaaatttattataaattttactagaattgctttttgggagtcagatgcattattgcatgatagaattatagctaatgaagagcttctgagctagttttctttaagataaaaaaaattaactcaggcataactcaggccagtcaaatcaaagttgaatttttaaatgtcaaaaggctaggccgggagctgtgactcacacctgtaatcccagcactttgggagaccaaggcgggtggatcacaaggtcaggagtttgagaccagcctggccaacatagcgaaactctgtctctactaaaaatacaaaaattagctgggcatggtggtgcatgcctgtaatcccagctattggggggcaggaggatcgcttgaacctagtaggcagaggttgcagtgagccgagatcatgccactgccctccagcctgggcaacagagcgagactctgtctgaaacaacaacaaaaagtatatctatatggctaatttctttagttgaatttggttcaaattggatcaagtggtataatcttctaagaaaagtcttttagtatctcactccaagtatctagaaataccttagaatgtttcaaattattaaaaatacttctcggttggctcttccctccacctcctcaagtacttcattattttatccatggaatatccccattctcacattaagggcaagaaatctgagacctatggtaatagtttcttttttttttttttttttgagaaggagtttcgctcttgttgcctaggctggagtgtaatggcatgatgtcagctcaccgcaacctctccctcctgggttcaagtgattctcctgctctagcctcccaagtagctgggattacaggcatgcgccactttacctagctaatttttttttttttttttttttgtatttttagtagagatggggtttctccatgtttgtcaggctggtttcaaactcccaacctcaggtgatccacctgccttggcctcccaaagtgctgggattatacgtgtgagccaccacgcccagccgtatcatgatagtttcaatcaggaagagtgaaagctgtaataaccatgtaactttgtctaactaagtgtgcagagatctgaaagtccaccaggttggctctttaacataaagaagtagagagtttgcctaaaggaattagcagaaatagggaaataacttttatttgcagatcccaggaaggtagattacaaacaacagcaaatcttagtgtctctaaataacactctaggccatttggaatataaaaaggtaattattttacttcagaaaatatctccaaaagttcactttttttttgagacagagtcttgctgtgtcgctcaggctggagtgcagtggcacaatctcagctcactacaacctctgcctccccagttcaagccatcctcccacctcagcctcctgagtagctgggactacaggtgtgtgccacttgtccagctaaattgttgtatttttagtagaaacagggtttcaccatgttggtcaggcaggtctctaactcctgaccttgtgatctgcccgcttcagcctcccagagtgctgggattataggcgtgagccaccatgcccagccacaattttatttaaacctcctgtagaatttggataggagaataaaagctttaccaataggaaaatacttttcatgaaatggtttcaaggattgtgaacttggcaggtgaagcataacagttattgaaaatacttttagccaaggaaatctactgatgcaaattaaatatatttacaagcccaaggcctgtggtagaaacatcctaagagtatcacaaatgtacagtttactgcctggattattgaaagcaaaatagctgtgttatatagatcttaatagcagaagctttcaaagattactcacagaaaagcagctttcagaactcattatgttctaaaaaatgtatgtttttctttcttttttattttttttgagatgaagtctcactcttgtcccccaggctggagtgcaatggcgtgatcacggctcactgcaacctccgcctcccaggttcaagtgattctcctgcctcagcctccctagtagctgggatttcaggtgcctgccaccatgcctggctaatttttgtacttttagtagagatggggtttcaccatgttggccaggttggtctcaaattcctgacctcaggtgatcccccctgcctcggcctcccaaagtgctggggttacaggcgtgggccaccacacctggccaggaatgtgtgtttttcaaaaattacttttgaaagactaaagccctatagttgataaaactataaaatgtctttatgtatttgtatggtgatagaaactgtaaaacactttataccattaaatacacatgaaattaatatcttcctggtctcaggatttccataaaatttaccctttttaatttggcaatgctaacagctacagaagacatattaccaccaaccaaccgttgcttcattagaaactgcaccaaatccaatgtcaaaaacattactttatttttctagtatgaaatgtcctattacatacaaaagaattgctgtttagaatttgccacaatttgttgaaaacatagcaatctattgcctacaggtaggaaagttcttgctgcaacaaattttaaatgattaagcccatatatatttctatatatatgaataaatagtgcagaaatactgtgacgtgatgagatgcagaataattttataattcattaaaatgtagaattcttgcatcagcacagtgcatacaatatgtaactttttttaaaaagtaaaaggacaaaataatccatatttaagtatttccatcttaatattttaagcaaaaatgttttcatgttttcatattgagtgattagtctctttagtttgtaaacataggtttaagtgacatcttcatgtacaaaaaggaatgggcttcattagataaaattaagccagaataacctgtacacctgagcctgtaataagaaagaattgggaactgtagcaacatctttcttttaagaaaccaaggtctgggaaaggttttgcatagcagggaaacgttgaaaggaaggaaacttttaaaagcaataattagataaattccagaagttgataggacaaagctaatatgagttagaataaaatctagtagaatttttgcaaagctgcataatccagctatggcagattttatagaagctattaccacaatgcagtaatacaatgtgtaagaacattgaaaggaagaacatgcaaaatacatcttcctcattttcttcctactgcttacactacttttccttacatggaagaaacaaacaaaccaacaagcaaaaaacaaacccaatcaacaaataacacagaggatgagatcatctaacaaaaaatgtccttcatacaatataagtagctgtctgtaattggtaatttgcccagtatcacagaatgtacagatgaaggcaatgtgtatcttgtcgcattacctttttcgttagtatgatcaactgatgcgacaggattagcacccctgaagattcttctctgacgtgatgacaattgactgggaatgataaaacgaggggccactgctgtccaggagaattccaggtacaattagattcttttgcctttcatgaccttgcagccctccctccccacagaggcttacagataatcattagcacacattcaaagacacctctgtctgtgggagaaaaactatctccatttattttgtttcacatacatccatagttgaattttaatacaaaaagaaaaattagaatctgacaaatgtttacaaagaagataccttcaaatagattttactcatttcaacctggtgtggagtaattgacaaattgtactgttatattcaagtcaccagagtctgtagtccaggaccacttagcccaacctttatgcaagcttgattttaatctaccatgaacaataaactcattgttgattcgcagttgtgtgtgtgtgcacatgtgtacatagcagctcctttcatagaaagaaaagacatctagaggttgtcttgtacttttacgtacaggaatcattgataagatatggatggattatatgtaaccgtggctggattttataagaaaaaataattagttgacaaatgagggcagcaataaaaaagcatcttttttgcaacaataaataaatacagtcaaaagttttctttgagactctaaaccagcttcttcactgaagagcagacgtggcatttccatggagttatacttgaccccacagtatcattgtttcttgctttctttttcttttttttttttaataaacaaaattttctcgcttctgccacaataataaaaccatttgatcttgacaagataatggtgtcgttgacttttcttttttctttttcttttcttcctttttttgtttttgaaacggagttttgttcttgtcacccaggctggagtgcaatggctcaatctcggctcaatacaacctctgcctcccgggttccagcgattctcctgcctcagcctcccaagtagctgggattacaggcataggccaccatgcacagctaattttgtatttttggtagagacggggtttctccatattggtcaggctggtctcgaactcccgacctcagatgatccgcccgccttggcctcccaaagtgctgggattacaggcgtgagccaccgcacctggcaactttgcttttttcttgtccattggacaaaattggccaataatataattggactgttatgaccaataaaaacaaagtttaggtcaagtcttgtcaggatagcctcactaaaaagatctggctccttaatttaaaatagttcaggcaacaagattcttgctgtgttttatgttaggttaacatgctgaactttaggaagctgtagactgcagtttgttgttgtgagacctacagagtatagaaaaagggaacaattgagcacctttcatttttgaaaatgatgctttatgcggatgccaaagtaaataaatctggaagaagcagccatgttctttcattcacccttggcaagcgaatagaaaagaacgattaagaaatttttaacctataataataaaacttttcactgtacactaagcataatagctcactggaaaaagccaatatttaaaatatgtatgtatatatatttgtctaataaagattacaacattttcaggcaactggacaaatagagacatttacagaagcattaccattgtggtgaaaggtgcgtgtgtgtgtgtatgtgtgtgtttatttacacggatgaggggaatataaagggaaaaattatgctaaaacaaaagaaaaagcaattttaaaatcatatttttctattaaagtccagaaagtctcccagtttcacacagttttattcacaattttttttttttttgagacgaagtctcgcttttgtccccaggctgtagtgcaaaggcgcgatcttggctcactgcaacctctgcctcccagattcaagcgattctcctgcctcagcctcccgagtagctgggattacaggtgcctgccaccacacccggctaatttttgtactttttgtagagacgaggtttcaccatgttggccaggctggtcgcaaactcctgacctcaggtgatccgcccgcctcggcctcccaaagtgctgggattacaagtgtgagccaccaaggctggcctcacaacttttgtcagtaaaccaaattactgtacagttaccaggactaagtcaaaggactttatattgcaatagcagataaatttatattgcaatagcagataaatacagtattccaatagtttacaatttttaaatacattgtttcacgtggctgctagaataaattttttaccactatacatcgttaacattaaaaaattatattagctaacctgactttttggggggcaattttggattacgtaatcacaaggtacaataaaacagtgaccccaacatccagttctgattccagttaaaaatttagactaaagatatcacaatccgtaagaaaagaaagaatatggatggtataaatgatgaattataacaaagtgcagtaatgaaaacaatgtgcaaacaatgctggagatcataaattacaatgggaaaatatggcaaaggaaattctggaaacccataataaaatcaagtttcaataactggctagttatgtttcattctaccttaaatctggaaagcaatagaaattccctaaaaatgcaacagcaagttgtctttatacaattctttgcattgtaatttttttctttttttctttttttttttttttttgatttgtttgttttgagacagggtctcactctgtagcccagtctggagtgcagtggcacaatcatggctcactgcagcctcaacctccagggctcaggtgatcctcctacctcagcctcctgggtagctgggactacaggcacgtgccaccatgctcagctaattttttgtattttttgtagagatggggtttccccatgttgcccaggctggtctcaaactcctgggctcaagtgagctgcctgccttggcttctcaaagtgttgagatcacaggtgtgagccactgcacacagcctaatttgtttatttaagcagaattgagcaaacgtctccattcagctcccatgtgctttattgaaaattatgtcaacttcagtatattaaaaagctacataaaataaccaggtggcaagaagacatcctaagtggcccctacactatgcgggcccagcctaggtctcctttgctcctttaccaaattccctttgtcttgccacaggccccaggacctccaagcaacttcctctccttcatcagcagttgccagcagtcatcctctgggctctgccagcaagttggcagcagggtaggattcacaccccttggcttctacctcacagttaccaccaaaggcctttccaatttaaaaaagcaattttagaaattgaaccagaggaataaccaccatgtacaaatcaaaaagcatagaggggcttataatgagaagttgtgctcctctgtcctaccttaactccctctgaaatccaggctccctatgatcaatccccttgacctttcagttctctgggtagatttcttttcttttcttttctttctttctttctttttttttttttgagacagagtcttgctgttgcccaggttggagtgcagtggtgggatctcagctcactgcaacctcctcctcctgggttcaaatgattttcctgcctcagcctcccgagtagctgggattacaggtgcccacccttacgcctagctaatttttgtatttttagtagagacaaggttttaccatattggccaggctggtctggaactcctgacctaaccgcccacctcagcctcccaaaagtgctaggattacggacatgagccaccatgcctggtctgggtagattttttttcttttgagatggagtctcgttcttgtcgcccaggctgaagtgtagtggtgtggtctccactcactgcaacctccgcctcccacgttcaagtgattcttctgcctcagcctccagagtagctgggacttacaggcgtgcaccaccatgcctggctaatttttgtattattagtggagatggggtttcaccatgttggccagctggtctcgaactcctgacctcagatgatccacccgccttggccttcccaagtgctgggattacaggcataagccaccatgcccagcctgggtagctttcttatactgctctttcttgttttatcaactttcatttaagccctgtgatggcaaatgagagccaagctcacttaaccattttcccacctccatttttgagtcctagtcttttttgttttgttttgttctgttttgttttattttgttttttttttgttgttgttttaagatggagtcttgctctgtcacccaggctagagtgcagtggtgtgatctcagctcactgcaacctccacctcctgggttcaagcgattttccacctcagcctcctgagtagctgggattacaggcgctcaccactgcgaccggctaatttttgtatttttagtagagatgaggtttcaccatcttggccaggctggtctcaaactcctgacctcgtgatacacccgcctcggcctcccaaagtgctgagattacaggtgtgggccaccgcacctggctgagtccaagttttatttccctataatttaaaaattatatcattccatgctttgtctgtaggctgattctaaaagttgaaaaccaatgtcattatttttatttttattttttttgacacggaattttgctcttgtggcccaggctggagtgcaatggcatggttttggctcactgcaacctctgcctcctgggttcaagtgattctcctgcctcagcctcctgagtagctgggattacaggtgcctgccaccacgcctagctaatttttgtatttttagtacagatgggctttcaccatgttggtcaggctggtctcgaactcctgatctcaggtgatccacatgccttggcctcccaaagtgttgggattataggcataagccactgttcctggcccaatgtcattatttacattattacgacaatgtaaatatttttctctataccacctagtcctttgctaataaggcattcttttttttctttttttttttttttttgagacagagtctcgctctgtcgcctaggctggagtgcagtggcacaatcttggctcactgcaacctccacgtctcaggtttgagcaattcacttgcctcagcctcccaagtagcgaggattacaggtgcctaccacaatgcctggctaatttttgtatttttaatagagacgaggttttgccatgttgtccaggctggtcttgaactcccgacctcaggtgatccatccaccttggccctccaaagtgctgggattacaggcatgagccaccgcacctggccttttttttctttctttctttttttttttttttttttgagatagggtcttgttgtgtcgtccaggctggagtgtagttgcatgaacatggctcactgcagtatctgtctcctgggcttaatcctcccacctcagcctctggagtagctgggatcatgggtgcacatcaccatgcctggctaatttttgtattttgtaaagatggggtttcctcatgttgcccgggctggtctagaattcctgggctcaagcatcctcctgcctcagcctctcaatgtgttgggattacaggcatgaaccaccattcccagccaacaggccctcctacacaactttttgtttttagtggcgtttctaattgcctttcatttttatccctgacattctttggcttaatcatagccttatgtttttctgtcttaaacaaattatctaatgcatgagtcattgtcttgccctactgaccctctggggagtgctccattctcctgctaggatttggattgcttaccgcacagcctgctgtacaaatgtcaccttgagtcagagtaattctcattgctttccctgaacctcttgttttctgaacccaaataaataaaaatgtctggccaggcgcggtggctcacatctgtaatcccagcactttgggaggccagggcaggtggatcacttgccttgagaccagcttggccaacatggcaaaaccccatccctactaaaaacacaaaaattagccaggtgtggtggcaggcgcctgtaatcccagctacttgggaggctgaggcaggagaatcgcttgaacgcgggaagcggaggttgcagtgaggtgagattgcaccactgcactccagcctgggcaacagagtgagactctgtctcaaaaacacaaaacaacagaaaaatttctagcccagtgcagtggctcacggctgtaatcccagcactctgggaggccaaggttggcgggaggatcgcttgagctcagttcaagactagcttgggtcatatagcaagaccctgtccctaattaaaaatatatattattaaaaagaaaaaaatttgtttccttatttttgatagcacacttttttttttttttttttttcctgagcagagtctcactctgacacccaggctggagtgcagtggtgtgatcttggctcattgcagcctctgcctccctgtttcaagtgattctcatgcctcagcctcctgtgtggctgggactacaggcatgcgccactatgcccgcctaagtattgtatttttagtagggacgaggttttgccatgttggccaggatggtctcgaaatgctgacctcaaatgttccatccgtctttgccttccaaagtgctaggattacaggcataagccatttcgtgtctggccaatagcacacgcttttaaaaaatacctgccaagaaagggtaccctgagtccttacatgactgaaaatgtatttattctgactttacttgactgtttggctgcacatagacttctaggttgaaaatcattttttcttaaacttttagatttattcttccataatcttctagcactaaatgttgtagcggaaaaatctgacaccaatctaattcttgttttatagattgtctgttttatctaaaagtttcttttattcttaatgtttggaaattttatagtgatgtatgtaggagtgagtctttttccatttgtccacctggcttataatgtttatcaactgaccccttgctccccccacccctcatagagtgcaggggctttaatttattcactgctaaattccctgtatctggcacacatcaggttctcaatagtcatttgctgagtgaatgaatttattctgctagaatttaaagtcccgtgactcgcatcagctcagaaaatttttcttttattcttgtcttttttttttgagacagggtctcaatctgtgattcaggctggagagcggtggtgtaatcacagctcactgcagccttgaactcctgggcacaagtgatcacagctcactgcagccttgaactcctgggcacaagtgatcttcctgtcatagcctcctgagtagctaggactacaggtgcacgccactatgcctggttaatttttaaaatttttgtagagacatggtcttgttatgttggtaaggttgggaattttttcttcttcttttgtgagagtctcactgtcacccaggctggagtgcagtggtgtgatcttggcacactgcaacctctgcctcctgagttcaagcaattctcgtgcctcagccacctgagtagctgggattacaggtgtgcatcaccacacctggctaatttttgtatttttagtagagatggggttttgccatgttggccaggctggtctcaaactcctgacctcaggtgatccacccgcctcggcctcccaaagtgctgggattacaggcatgagccatcacgcctagcctagttttacagattttgtagtttcttgtttttggtctataacctgctgcctacttttcttgcttccttgcctatatatatattcatttattttttaattcctttgctgagaataaaaattggatactttagctgggcttgtccttcagtttttttgtttttgtttttgtttttttttgagacggagtctcgctctgtctcccaggctggagtgcagtggcgcaatctcggctcactgcaagctctgtctcccgggttcatgccattctcctgcctcagcctcccgagtagctgggactacaggcgtctgccaccacgcccgcctaattttttgttatttttagtagagacggggtttcaccgtgttagccaggatggtctcgatctcctgacttcgtgatccgccccactcggcctcccaaagtgctgggattacaggcgtgatccaccgcacctggcctcagttttttgtttgttttttttttttaaacaggcaagttcttgctgtgtcacccaggctggggtggagtggctcgatcatagttcactgcagcctcaaactcctgtactcaagtgattctcctgcctcagcctcccaagtagctgggactataggcactcatcaccaagcctggttaatttttttttttttttttggtagtagagacaaggtctcatactgtggcccaggctggtcttgaactcctggcttcaagctattctccccactcggcttcccaaagtactgggattacaggcataagtcaccttgcctggcctttcacttttattttaggtaaactgcttttaaaataccctcttagaaaccatcttccttgctacagaagagagaaagcaccccgtggcttttcctcaaaggaagatcactgtgggggctgggcgcggtggctcatgcctgttatcccagcattttgggaggccgaagcgagcggatcacctgaggtcaggagtttgagaccatcctggccaacacagtgaaacctcatctctactaaaactaccaaaattagtcgggtgtgatggcacgtgcctgtagtcccaactacgcgggaggctgaggcaggagaatcgcttgaacctgggaggcagaggttgtattgaggtgagatcacaccactgcactccagcctggcaacagggtgagactccatctcaaaaaaataaaataaaataaccgagtatgcacaattcaactgtaatagatactatcaatttaccctccaaagtgaccataccaatttatacccccaccagccttgctaaaagtattctaagatattaattttatggttaataaaatatacactgagacttctgaaaaaacttcaaattcaactcatgtgtacccacaggttccttaataacaccataataatctggtgcatcattagggtctactggttcaaggaaaggctgggccatcttatgggcctataatgaaaaagtaggcattcttattgtcagtgaaaacactaattccatttaagattcccagttgagtcactacatcaatgaacccaaaagtcagttttaaatgcgatacatgaaatactttatattaggtgatttctgctctagtaataagttacctaagatgagcttcctctgcaataatggtactcaaagcttggtcggaagaccttggtgtggtgaaggggtgggttgcccctccacacctgtgggtgtttctcgttaagtggaacgagagacttggaaaagaaaaagacacagagacaaagtacagacaaagaaataagggggcccagggtacctgcgttcagcatatggaggatgctgccggcctctgagttcccttcatatttattgatcattcttgggtgtttctcggagagggggatgtgtcagggtcataggataatagtggagagaaggtcagcagataaacacatgaacaaaggtctctgcatcatagacaaggtaaagaattaagtgctgtgctttagatacacatacacataaacatctcaatgccttacaaagcagtatggctgcccgcgtgtcccacctccagccctaaggcggtttttccctatctcagtagatggaacatacaatcgggttttataccgagacattccattgcccagggacgggcaggagacagatgccttcctcttgtctcaactgcaaagaggcattccttcctcttatactaatcctcctcagcacagaccctttaagggtgtcaggctgggggacggtcaggtctttcccttcccacgaggccatatttcagactatcacatggggagaaaccttggacaatacctggctttcctaggcagaggtccctgcggccttccgcagtgtttgtgtccctgggcacttgacattagggagtggtgatgactcttaaggagcatgctgccttcaagcatctgtttaacaaagcacatcttgcacagcccttaattcatttaaccctgagttgacacagcacatgtctcagagagcacggggttgggggtaaggttataaattaacagcatctcaaggcagaagaacttttcttagtacagaacaaaatggagtctcctatgtctacttctttctacacagacacagcaacaatctgatctctctttcttttccccacagtgtggggggtggaacacaagcttagaagtcacaaaatcagtattctgggccctacatgatgagctgtcactgagtgatgctggcattgcaactgcttctgtaacaggtgggatgggttcaaagtgtggaatcattaccacagctgattaatgatgaggtggcagagatgtgatgttagataacattcaaccacacattgagactacgattccctttttagtttcttcaattcttgtgattatgataaaaatagaagaaagtttcaatccaatgcactatatccttttatttccccccattgttttgagacagggtctcgctctgtcatccaggctggagtggagtggcacgatcatagctcactgtagcctcctgtgctcaagtgatcctctcacctcagcctcccaagtagctggataaacaagtgtgtgccaacatgcccagctaattttttatttttattttttgtagagatggggtctcactttgttgcccagattggtctctaactaattgactcaagtgatcctcctgccttggcctcccaaagtgctgggattataggtgtgagcaaccacactggccttctgtgtcttcaatacacctgtatcacttgctaatcctgcaaaccatacctatcctggttttcttttctttcctttttttttttttttttgagacagagtctcacactgtcacccgagctggagtgccatggctcgatcttggctcactgcaacctctgcttcctgtgttcaagcgattctcctgcctcagcctccctagtagctgggattacaggctcacgccaccacacccgactagttttttgtatttttagtagagacggggtttcaccatgttggccagtctggtctcaaactcctgacctcatgatttgcccacctcagcccccacaaagtgctgggattacaggtgtgagcccccgtacccagccacctttctgtctttcataaggaaaataataactataatctaatcatactgtttctcaatccatgggagtgagaggaagtttctttaaaaataaaatgtataaagaagtgagtcacgttagattatctgagtgttagataagctgaggtggtgtggggatatggtaaagctcatgacactggtatgtgaaggactgaagtttgtcaagcccttcactagactagctgagagtcagtaaataatcactctaagattggaaacttgaaatcctaacattggaaacttgaaatcctagaaatgcttccaaaattatgccagctgatttcattttcaaatgctgcacacagaggggctctcatctgtaaggaacggagcaccctcttcaactcctcatcatccttctctgttagtggtgtgagcactgtcatgacatcctctgttgactggcactgtggacagacatactcatcaatgagctctgcctcactctgcaagatgccaatgcagcacccatggtaccaattctgacaccgatcatggccaataaaaaatctgcaagatccgaaatggaaatgtgagttcaaaacagatgggatgatgttacttataataaagcatgcacctgaaaatttgctaaaccctgggatataaaatagttttagtattgtggttttaatactttcaagatcgacattccagtacattaatttagtatttttgatgttaagaacaagcagtaaaaaaatttataagaacactgtaattttggagaaccaatttaaagataaatatgaaacattcaattgattttaaagctgaaaacaagtcacaaatctttcaactagtactgtaccatgtgggagttcaaaatcctataaggtaataacagagtctcaaagcttatacccaaattagtgtttttctaacctataataaagcaccatttcaaacactgataaagtccaaacaagtcaagctagtttaatctcattaatttctatgttacatattgaagaatcaaatctaccattaaaccacattttccccaatgtgtctcaaacattcactatgaagcaagataaattttgaagggtaggtaaaaagggaaaaagagaaaaaaaaatgaaaaggaatttgtaatgtaagtgtataacaaatgtagaaaaaatctgctttttattttaaagtaaataagtaaccagtcagagcaatttggcttcctaaattattaaatgtgatgctcttattagaactcactgtgactgcaggtgttctgcagatacagtacaattcctcactgctgccctcttgtgcccatttacaatcattacagatgtacacatccattttcttagcctccttttctgcgatgccaacacattctccataatagcagttagtacaaagatcacagccaatatagaacctagaagtattcacaacgaaaatgacaatgtaattgtcgttttgagctgcatggtacttaaatctgtcttccctgccttgcttcatttttttacaggataacttcctgctatgagtcagctaaacattcctgaatccaaccattctacccctggcaaactccagtatctgatgctctatcacatgtgcaaacaaagtcactcacatgggtttcaacaagtacactgcttagtgaaatatgggtctttaaaaacatactggaatttgaaaaaataaaccacacactgatggtaatgtcttcctctgaatgaatgtgtgcaaaactgtaacaggcacaaaaaccaaagccaaagaatcaaagacttacacctgtcaaacctattccacagaagccatttcaatatcagggctatttcttagataggtttaaaaatgtatctcacaatttaaatttgaaaacaaagcaaagcgcaaacaccaagtagaagttacactacaaggaccatgcaggtcagccaggtgtagaagataaacggtcaaaatatgctaagaagaagaaaactaagaaaggtacatagagcaattcaatctctaccaggttttctgaataaacattggaatttaatcgaattaaaaataatttctcataatggaatatggcatgggccactttttcagttaatataatgtttgtgacaatgtgggcagtggcctggctagttaacgggtagggaacgtggaaggagctgcttcagttcaacatcggggacatggtatggggaaggatgcaaagatagttatccagaatctgtctacactgcttggcagggtctacactgcttggcaaggcggagctgtgtaagtgtgtgattgtggagtgcacagtggcctctgtaataaaagacgtaatgacaaaagaaaaagtaaatgtaacaaacgcttatacagtgtgtctacaagtgttgataggcacagtgtaggaacatcatgtcaaagtcatagtgagaattaccatgaatcacagggaagcaggctggctttgccgataccattggcactcctagctctaccaaggcatttcttggtagattcacctagaggaatggaagtcgtcctcaagcttcaaattgacctgcttcatgaatgtgaaggaataatacatggctatgtagtttatcctgttaccactaacttttttcttttgtctcgctgtataacccaggctgcagggcaggggcaggatcacggccccctgcagcctggacctcccaggctcacatgatcctcccacctcagcctcccgagtagctgggactacagatgtgcaccaccaggcccggctttttttttttttttttttttttgacggagccttgctctgtctcccaggctggagtacagtggcatgatctcggctcactgcaacctctgtctcctggcttcaagcaattctcttgcctcagcttcccaagtagctgggattacaggtgtgtgccaccacatctggctaatttttgcatttttggttgtgccacgttggccaggctggtctcaaactcctgacttcaggcgatccacctgccttggcctcccaaagtcctgagattacaggtgtgagccacagggcccagcctcttttcatattttttaaaaaaagttttaatgagcagtgaggacgaccagaggtcactttcgtcaccatcttggttttggtcggcttctttactgcatcttgttttttctttttttttttttttgagactgggtctcactctgtcacccaggttagagtgcagtggcacaatctcggctcagtgtaccctgcacctcccaggctcaagtgatcctcccacctcagcctcccaagtacctaggaccacaggcacgtgccaccaagctcagctaattttttgtatttttgttagagacagggtttcaccatgttggccaggctagccttgaactcctgacctcaggtgacccatctcagcctcccaaagtgctgggattacaagcgtgagtctctgtgtctggccaacatactattgtctcaatatgcattttgccatactttttaagtgcatctcttctgctatcctgtagtacaacttactcttggaaatgatcaaagcaaactatattaccctagggacaaacccattgtgattggcatccacgaacaaatttggtgtaaagaaatcatatctatgaccaagagggtttctttcttatttggagataagagtctcactttgtcaccctgcctggactgcagtgacataaacacggcttgctatagccttgacctgccaggctcaagtgatcctcctgcctcaaccccttcaaatagctacaggtgctcaccaccatgcccagctacttttttttttgtagagatggagtcttgctgtgttgcccaggtaacttacctcctgagctcaagtgatctgcctgcctttgcctcccaaagtgctgggatgacagttatgagccacttgtacccagccataagaatatttcttaaaatctgacttaaaatttttttaaaaaattcttttagagatagggtttcaccatgttggctaggctggtctcgaactcctgacctcaggtggtctgcccaccttggcctcccaaagtgcttggattacaagtgtgagccactgtgcccagccaaaatctgacacatttataaatttctacaataattttaaataccaaaaatattcccaaaacgtttcatcatgattatttttcttcctaaatcttatagtctctcagaaaaataacttagcccacgtttcctttaaagagtttttaatttttttaatgaagggccgaattaattttatttttccttctttgaaaaaattcatccagcacactggctcacacctgtaatcccagcagtttgggaggccgagggcggaagatcacttgcgtccaggagctcaagagcagcctggccacatggtgaaaccccatctctactaaaaatacaaaaatgagccaggtgtggtggcgcatgcctgtagtgccaactacttggaaggctgaggttggaggctcctttaagcctgagaggtgaagacttcagtgagctgtgatggcaccactgtgctgcaatgtagatgacaaagtgagaccctgtcttaaaacaaaacaaaacaaaacttttttttggagacagggcctcacttgatcgccccggctagagtacagtggtgctatcatggctcactgcagggtcgacctcctggggtcaagcagtcccctggcctcagcctcgccaagtagctgagactacaggtgtgcatcacaacacccagcaaattcctttttgtagaaacagggttttgccatgttgcccaggctggtctcaaaatcctggcctcaagtgatccacccacctcagccttttagaatgctgggattacaggctgtgagccacaactctcttggcctataaatgataatttaagtgaatctctgaagctacagttttttgtttcgagatggagtctcgctctgtcgtgcagtggcatgatctcggctcactgcaacctccgccttctgggttcaagtgattctcctccctcagcctcccaggcagctgggattacaggtgcctgccaccatgcctggctaatttttgcatttttagtacagacggggtttcgccctgttagccaggctggtctcgaactcctgacctcaagtgatcgtttcacctcagcctcccaaagtgctgggattataggcatgagccattgcgcccagcctctgaagctatagttttatagattctaaagcagagacttcatatagatgtctatgaaaagccaaaaacaaacaaaaaacccacaggaaaacctgattccccacgccaaaatttcaaggatttgcctaaaggtaaggtccatctgtacctgaaataagtttgctgtgcctctttttctgcagggtaacccagccctatgcaccaatcattacatgactacctcaggaagcttttaaatatatcacaaatattttaccaaataaacctgaatggccctggtttaatgaatctgcttctctgtctatagactatctagtctcataaagtcaaaagagaagcaatgtgacaaattattcaacagcccttctctatttatagagagagactgaacttcttctttggttagaaagaaaaccttgagtttcatttcctagttcatatatttttataacatcgtgggacggattttgggagaaccaagatggtatagcgggtgcacactttgatcctccctctcccttcaagaacatacaagtgagagtaaaatataaaaaagagaaattgaaaagacatagtcatgcttaaataagttacaacaatctcaatggaacagacacaaaactgtgagcaggactaaaactgcaggccttctagactccagatgcagaaggaggaagtggtggctgaacactaacagtaagagtttctcgggggtaagggaggctaacatgctgtgtgtgaggcagtgataggctccctgctggaagttaagggttgactgggctacactgggcttcaggagagaagaaaacaacactcctctcactcaaaataagcttgcaaaattcaaatgtttgaaaatgaaaatgtgtaatatgaaaaaaagacaaccagggcccatacggtggctcatgcctataatcccagcactttgggaagtcgaggaaggaggatcacttgcttgagcccgggagtttgagaccagcctgggcaacatggcaaaaccttgtctctacaaaaaaacaatgacaacaacaataacaacaaaaaacaccccaaaattagccagagatggtggcatggcacgcgcctgtagtcccagatacttgggaacctgaggcggaaggacttactgatctgggtagggggaggctgcgatggggtgtgattgcaccgctgcactccagcctaggaaaaagaataaggccctgcttctcaaaaagcaaaaaaaaaaaaaaaaaagccaataaaatcaatggtctaatctgaattcactccaaatgaaattatagagcaatttgacaggccaggcccagtggctcacacctgcaatcccagcactttgagaggctgaggagggaggatcacttgaggtcaggagttcaagaccagcttggctaacatggtgaaaccccgtctctactaaaaatacaaaaattggctgggtgtggtggtgggcacctgtaatcccagctacttgggaaactgaggcatgaaaaccacttgaacccaggaggcggaggttgcagtgagccgagatcatgccactgcattccagcctgggtgacagagcaagacactctctcgaggaaaaaaaaaaaaaagaaaaggaaaacaactcaagggttggataacattgccagtataaccataattcaaaacaagcagcagaatttggaggataatttgtttcattctcaggaaaatgtgaaactctgaaactgctttttgagtgcagggtatttccggggcttttcctaaagtcttaacccttggctctgaccccttatttgaagtttggagagcagaaccgaggattgtattactacagttgtggacacaggagaggggttagtctccccccgctccaggagtaagggatgctgggctgctcgaacacaggccttgttagaactcccttcaaacaggatcccagagatgtggggagaaggtaactggccttaagaatgattgcgctacagctttcgaaaactataatgcctttcaaatatggcttattgcttggatctcaatatctcccacgtatcttgggtggaatattttgccgaagatctttctgtcaatcatttacaatcatgtgctgcaaaatgaagtttgggtcaacagtagaccacatatatgatggtggttctgtaagcgtataatggagctatccctatataggtataccatttttatcttttttttttttttttttttttttttgagatggagtctcgctctgttgtccaggctggagtgcagtggtatgatcccagctcattgcaacctccacctcccaggttcaagtgattctcctacctcagcctcctgagtagctgggattatagacacgcgtcaccacactcagctaatttttgtatttttagtagagatggggtttcatcatgttggccaggctggtcttgaactcctgagctcaagtgatccacccaccttggcgtcccaaagtgctgggattacaggcatgagccactgtgcccaggccccatttttatcttttacacagtattttaactatatattttccatgtttacatacacaaatacctgccattctgtgacagttgcctttagtattcagtacagtaacatacagtacaggtttgtagcctaggagtcctaagccataccgtgtaccctaggtatggtggctacaccacctaggtttgtgtaagtatacgctatgatattagcacaatggtgaaatcacctagtgacacatttctcaagctcctcacgtggcaagcaatgcatgactgcatatgaaagctcttaaatagagattgtttctaaattaatctcaaaacagtcattatttactatttatggaattttttttaaaaaaaggagcaaaagtatcatttcagtgggaacttaacttggggctacagtgttttatttaacttttaccccaaagttgcaaagtgttttgaaatttttccctgtaaaataattattttaattcaatttaaataaaacccaccaaggagacttcaagctttaagaagtctagcttcctgtgaaatgtgagaggaagtcagcactcatttcagaaatctgattataacgatagctccatccctaaatgaggtgaatcttggactctcttccattttattttattttatttttttgagatggagtttctctcttgttgcccaggctgaagtgcaatgttgcgatctcggctcactgcaacctctgcctcccaggttcaagtgattctcctgctttggcctcctgagtagctgggattgcaggtatgcaccaccacacctggctaattttgtatttttagtagagacggagtttcaccatgttggtcaggctggtctcgaacttctgacctcagtgatccccccacctcggcctcccaaagttctgggattatgggtgtgagccaccacacccggccccccttcaattttaaagccatcactatgcaccctatgtctatgccaagcactaaaataagatgaagcaccttcttggagtttacatgctggtaattatgccagacagtaataaaataggtaagaacggctgtgggggaagtcagctgggttctagttacagtcgcatttcaggaaatgatttaacatgctgactttaacaacctaagcctcttctccatgtgtgcacacagggtagatctctgaacacaggtgaccctagaagtgctgtaacttctaggggaatggctgtgttgagtcaaggcaggatgacagttcagcctcctcccaggctagtgcaaagggctcttcactcggattaaaaccttctctcccagaccgaattgccaactcccaacacccctcctacagaaaatttggagtcctcgcttattccctggcagcccctacctaatagggtggtgaattaattatcaaacatgcgacagtttagcgaaaatggcaacactttggaataagtgactgtaatgtgcatcctggcgcccattttgcaggtcagttgctctccctggaaggaagagtgttctcggatttcaccttaaaggaggaaggctgccagaactgaactagcacttctgaatatcctgaggcgaggtccggtgacttccttgggaagctctgccgcgcccccaccccaccctaccccaccctaccccaccacagcaggcgctggagtcctgggaccaccagggtctgaggcccaaatccttcctcactaaggggaggagaggggtgttccggcagggcaggatgggaaggcgtgcttgggcgggattgtgacataagagtgccctggtgacatggagcagatctgtgacataaataaaggtgtcataaagacagggcggggctcacgcttagaaggggcacgagcgtctcggagctgccagaatgtcttctgctcagtgcccggcactagtgtgtgtcatgtcccggctgcgtttctggggcccatggcccctccttatgtggcaactattgtggctactagtcaaggaggctcagcctctggagtgggtcaaggacccgctccagctcacctctaatcccctggggccgcctgagtcctggtcttcccactcctcccatttcccacgggaatctccccatgcgcctactctcccagcagacccgtgggactttgatcacctggggccctctgcttcctcagagatgccagccccaccccaggaatcgactgaaaatttggttccattcctggacacctgggattcagctggagagcagcccctggagccagagcagttcttggcttcacagcaggatttaaaggacaagctgagtccacaggaaaggctccctgtttcgcccaagaagctgaagaaagatccagctcagcgttggagccttgctgagattattggaattacacgccaattatccacacctcagagtcagaaacagactttgcagaatgaatattccagtacagatacaccgtatcccggtagcctgcctccagaactccgggtgaagtcagatgagcctccagggccctctgagcaagttggaccttctcaattccatctagagcccgaaactcaaaatccagagacccttgaagacatccagtcctcttcactccagcaagaagccccagcacagcttccacagctccttgaggaagaaccttcttcaatgcagcaggaggccccagctctgcctccagagtcctctatggagagtctaactctaccgaatcatgaggtgtcagttcaacctccaggtgaggatcaagcttattatcacttgcccaacattacagttaaacctgcagatgtggaggttaccataacttcagagcctaccaatgagacagaatcttcccaagcccagcaggagaccccaattcagtttccagaggaggtggaaccttctgcaacccaacaggaggccccaattgagcctccagttcctcctatggagcatgaactttccatcagtgagcagcagcagccagttcagccttctgagtctcctagggaggtcgaatcttctccgacccagcaggagaccccaggtcagcctccagaacatcatgaagtcacagtttcacctccaggtcaccatcaaactcatcatttagcttcacccagtgtctctgtgaagcctccagacgtgcagctcaccatagcagcagagcctagtgcagaggtgggaacttctctagtccaccaggaggctacaactcggctctcagggtcaggtaatgatgtagaacctcccgccatccagcacgggggcccacctctgcttccagagtcatcagaagaagctggacctttagcagttcaacaggagacttcatttcaatctccggaacctattaataatgagaacccctctccaacccagcaggaggctgcagctgagcatccacagaccgctgaggagggtgagtcttccctaacccatcaggaggccccagctcagactccagagttccctaatgtagttgtagctcaacctccagagcattcacacctgactcaagccacagttcaacctttggatctggggtttaccatcactccagaatccaagacagaggttgaactttctccaaccatgaaggagaccccaactcagcctcctaagaaagttgtaccccaacttcgagtatatcaaggggtaacaaatccaacaccaggtcaggatcaagctcagcatccagtgtcacccagcgttacagttcaacttttggacctgggacttaccatcactccagaacctactacggaggttggacattctacacccccgaagaggactatagtttctccaaagcatcctgaggtgacacttccacatccagaccaggttcagactcagcattcacacctgactcgagccacagttcaacctttggacctggggtttaccatcactccaaaatccatgacagaggttgaaccttctacagccctgatgactacagctcctcctccaggacaccctgaggtgacacttccaccttcagacaagggtcaggctcagcattcacacctgactcaagccaccgttcaacctctggacctggagcttaccataactacaaaacctactacagaggttaaaccatctccaaccacggaggagacctcaactcagcctccagacctgggacttgccatcattccagaacccactacagagactggacattctacagccctggagaagactacagctcctcgtccagaccgggttcagactctgcatcgaagcctgactgaagtcacaggtccacctactgaactagaacctgctcaggattcactggtgcagtctgaaagttacacccaaaataaggctttaactgcaccagaggaacacaaggcctccacaagcaccaacatatgtgagctctgtacctgcggagatgagatgttgtcatgtattgatctcaacccagagcagaggctccgccaagtgcctgtgccagagcccaacacccacaatggcaccttcaccatcttgtaagaatcacttttcctcaattgtcctctgtgtcctgcctgacatggcagccttttcctggaggccttcctgggccttctttatctccccaagccatatggacaactgactttctgctttcacctttgcttgtcaactctcccttctcctcattctcttttaatgttaggccccttctccagtcttttccttttactctggtcttttactcgtttttgtatccatttttatttagccccatcacatcattgcttaaccgctgctctcctcccattttcgcttcaccctctttacagcagcctgtccctctcccgatctcaatgatgatgctctaagtcgttaagagttgattccggagccaggctgcctgggtttgaacccagatctatttattagcttggtgacccagagcaagttattctgcctgtgactcaatttcctcacctttaaactggggatcatgctagttagcatttcataggattgttgtgaaatttaggtgagtgaatatatgaaacacttcatcagtgcttaccatatgtaggagagttggctgttcacatgattattcagtcctttagttttgtccagaactcatttttgtccctagctttctatatgtagaactagttttatgtcaaacccagggccaagtatgctactgtctccagaacacgaaaatgataggagggaagaggctgggtgtggtggctcacgcctgtaatcccagcactttgggaggccgaggcgggcggatcatgaggtcaggagatcaagaccatcctggctaacatggtgaaaccccatctctactaaaaatacagaaaaaaattagtcaggcatggtggtgggtgcctggagtcccagctactcgggaggctgaggcaggagaatggcgtgaacctgggaggcagagcttgcagtgagccgagattgcaccactgcactccagcctgggcgacagagcaagactccatctcaaaaaaaaaaaaaaaaaaaaaatgataggagggaagaaagagaataggcataaaaagggaggtatatataattaagtactaaaagataatgcagaccattggtgctagaatttgccagaatctgtgatccttgaggtgtggagatgctacatgggtaagctaaaactttacttgggtcttaaagagtagctataatttgttaaatagaagaaaaatgggagtacagtctaggcaaacgcatggctacaggtatggttggaatttagtagaccaatgtggctacaaagaattaggtgagggagcaatgaagatacgattctgtaaaaccttgattatcagctataggagtttgaaagttacacagtgaggtatggaaagccattgaaagtttccaagcaagagagattacatgatcaaaacaggaagattattttattttgttttttgcattatgtgcaagtgtagacatgcagaggattgttttagaatccatatgtaaagtgtccaaaaggaaaagcttaattcagggagacaaaatagaaaggtctagcaaaatctaggagtgaagtgtgaaggggccaaatcagatcagttgtaataggagtggaaagaaaaagcctaggatgtttcaacagagggcactgggccaaagctttggtgttacctggcatagggtttctttcttctcatttgttgataatgataagcttttgcccatatttctgtggaattatttaccattttggtactgatttgtagaagtctgtttagacacataagtgcttttagataaaatacttacattcaaagtaattaactggcatcatctgtccaagagatgggatggataagaagttaagcttccaggagatgcctcatcatttgtgccagtgaccccgcataatttcttgatgaattgtgcaaactgggaagctgatagctctggaaatgagaaagcaggtgttattttctgtttctgaatatccccaacaaggttgcaatgattcttttacttatcgtgttcattgttttcctacctattcaaggatataaactgtgtttcttcacagaaatttccaaggaaactatatttcttacattgatggaaatgtatggaaagcatacagttggactgagaaactgtgagtatattctctccaaatatgacaaaaagctaactgcattgtaagatccttcttggtccagaattttgaggtcggtacctctgaggaaagatatttctcctccatgccccaaatcaaccactgttgattgcaattgtatggtcattttaaaattaaatttggtaggctctctttaaaataagaggcaatttaaatttattttttatcatacaaatagtacatggttatattcctttttgttctcttttttgttttttttttcagagacagggtcttactttgtcctctgggctgcagtgcagtggcacaatcacagctcactgcagccttcacctcccaggcccaagtgatcctctcacctcagcctccccagtagctgggaccacaggtgcatgccaccacacccacctaattttgtattttttgtagagacagggtcttcctatgctgcttaggctggtcttgaactcctgggctcaagtgatcctcccaccttggcctcttaaagtgttcatattacaggcatgagccaccacccgcagcccatgattccatttttaatatataaaaatgcaataacagatataacaaaaactctccttgtgccctactccctcatccctgaagtaatgctactctgcatttagtatacatgcttccagacttttcctcatttacctacatacatatttacataaagcaaaatagatttgttttgtggttttaaaattttttcttcgcataaagggtaacatcttgcaacttgattctttcacttcatgatatgccttagatttctttccttcccagtacttagagggtcaccccattcatttaaactcctgcataatccatagtatggatgcatcatggtttatttaataattcccccattgatgaatgtttagattatgcttagttttcttgttacatgcattgctgcaatgaaatccctgtacatgcttctttgtgaacatgtgcaagtattcctgtagcatagatatctggaaatggaattcttggggtgaagactatgtagatataaaattttaattgccttcaaaaattttgtgccaacttactctattgtcagcagaatatgacagcattcatttcccaacaccttttcaccgctgggtattctccaacattttgctgaagttatggatgaataaaagggattccatctaaatgtgaatttttctgattactcatgaatttaatttagtatctttatatgtttattgaacatttgtgtttcttctctgagttttctggcctttgttcattttcctgttgaattgttttatcattttcttactgatttatagaaggaattggtttagacacataagtgattttggaaaaaatgcttacattcaaagtaactgacatttttcacaacagtttgtgtgtcacatcattatttcaatgtatatagacaagccacgatgagttctaaattaaaaataaacatatgctaggcgcggtggctcacgcctttaatcccagcaccttgggaggtaggcggatcacctgaggtcaggagtttgagaccagcctggccgatagggcgaaaccccatctctactaaaaatacaaaaagtagccaggcgtggtggtgggtgcctgtaatcccatctacttgggaagctgaggcaggagaattgctttatttattttttcagatggaattttgttcttgttgcccaggctggagtgcaatggtgcgatcttggctcactgcaacctccacctcccgggttcaagcgattctcctgcctcagcctcctgggtagctggaattacaggtgccctccatcacacccagctaatttttatatttttagtagagacagggtttcaccatgttggccaggctggtctcaaactcatgaccgtgggtgattcacccaccttggctttccagagtgctgggattacaggcatgagccaccacgccaggccagaactacattttaaaaacaagaaaattattacaaaggtcaggatagtggttacctattagggttagagagagggatatgattggaaaggggcacactggggcttctggcatgctagcaatgatcttttgtaatgatgtttacatgggtatctgcttcataattattaaactgaatattttggccaggtgaggtggctcatgtctgcagtcacagcactttgggaagcagacacaggaggatcacttgagccaggagtttgagaccagtctgggaacagagtgagaccctgtctcaaaaattaaattaaattaaatataaacaacatttatgttatgtgcactttatgcacattatagttctccaatttttttgatggggggaaaaaggttgaatggcttcacttgcagtcctgacatggttccatgtggggctttcataataaggtttgggaaaagagaggaggaaatggaggttctgctgatcttggtgccacccagagttggattctaaaagggattttgtgatctagagaggaggcatgaaataatagaatttggtgggaagaaacccactcttcaaggggtgtgcttgagtgtgtgtgtgtgtgtgtttgtggtggtggtggagagagatggacacaaaaaggaaaatataagaaaaggtttgaatgaaagcagagcagatcccaccatcttgaagtgaccatgacccagctttcctccacatgcaggagatggttctgtgtagcaaatagttgtagtttgcattttaatctagaaataacttcttcattttccagaattctcagagaaaataacttgactgaattacacaaggattcatttgaaggcctgctatccctccagtatttgtaagttagttaattatatttatgagtttttagtcatattatctgtaaaatgaataaggggttcaaattagataatctctcagatttctttgagcaataaaattctgcaattctgtaagtttgtatagggtctcagcccatctctaacactagctacctcctgtgcattttcagtttttaagttatatagacaaaatacagacaaaaacatttcacatggtaagaaaatctgagcagtgactgacacccatatgaaccttgttttataagggttcacatatcattctttttctattcagtctacaaccaatagatccaatctaatttatggtctatttttaaatagcccattaagttaagaatgggttttgcatttttaaagggactgtgaaagaaaaagaaaagaaacaaagaaatatgcgagagatcatatgtggcccataaaacctaaaatatttactgtctgaccttcaccaaaaaaaatttcaaaaagttggtttagtaggatgaaaggaactaaagttaacttcagatggttgcctaaaggagaagaaaatggagaccacctgcattcatttgaacatcattaatccagaattttttggtaatttaatcggaattaaattaacatttaaatattaaaaatagctgaattatatcaataatattatcaagaatattaagctaccaagagaatagactggtattaaggatttcatttcaggaattgttatattaaaacagatgtttaaaatgatggttaactgatagagctagaaatgtttacactaagaagcacatcagaaatgcccctaactcttcactaattacaaaataacgatcgccccagccctgttaccagaaagggatccctgtatttctgtctgtttagagacaagaagatactatgttcattgctatgaaagcttgattcttaccctttgtccatagaggtctgtatgtcattaatccttattaagctcattagtgatgctcttttgcaaacagattctttcaaatatagaaggcttaaggaaagtgggtgtaaagaccctcaggtggatgccaaagtgctacagagaccatgaaataataaaactacatttcctttaaaatagttattttccttctactcactcccccagctattcatttattttacaaatatttgagtttgctttatttccatgtgtcagttttaaacatggtgggcaatgcagatgagcaagacctagtccatgctttcagggagtttatgctcagaagaaatgggataaaaaataactacattaagaagaagaaatggatgtgggcactaggagggataaattgtttctcgaacatagaagaggaaaaaatgccttcaatttggacccaggaggatgttactagaacaatgccatttgaataggactttgaagggccattgtgtaacatcagacagacatcttggggaaaatactctaaacttgcaaaaggaaaatgggagggcaaaacacaggaaagtattcaaggaatgccatgagtacccgtagagtacaagaagggagagtaggaaaatggagccagatcttctagagctttgaatgccaagctgaggagccaacatggggaaccgtgttaccacagcagcgctgtaaggtagatctgcatcacagtcattgagagggcacgttagaactcagttctggactccaccctcgtagttactgattcagttggtctagagtgggaccaagaatttgcatcttcagtaatttcccaggagatgctggtctttgcaagccacttctggagagtttatatgatgactgtgtgcaggatagtttaggtagggagagactggagatggagatatcagccagacaacgttacaccatccaggtaaagagggagggacaaactccatcactgtataactgaagaaatttttttttatgaaatattaaagcaatacaaaaccaaaaatgaatttctattaatatgatagaaattaattctattaatatgatttgaattagttcaaagttatgtattaggtaaaggggtagcttcctttcaaatgatgtgaaaggatgtcttttatttcttctgatattgaagtggcttaggaaaacagacctaaactaagaaggtgtagaaatgtgagacttgtttgtttgtttgtttgtttgtttgagacggaatctcgctctgtcgcccaggctggagtgcagtggtgcgatctcggctcactgcaaggtccgcctcctgggttcatgccattctcctgcctcagcctcctgagcagctaggactacaggcacgtgccactaggcccggctaattttttttttttttttgtagagacagggtttcaccgtgttagccaggatggtctcgatatcctgacctcaggatctgccagcctcggcctccgaaagtgctggattacaggcctgagccaccgcacccggcccgactattttttttaatattagaaattgtgtatatagagataaaatctttgagctcataatctaagatttgatgacactacaaaagggcatctaatcaagtctactgctctcaggaaaaattaattccaaagtctattatgttgtatatttattaaaaccatgaaggtgagactctaggagaggtatgggcagggttaggggctctggaatgttcaaatacaagtccaaacgtttagagttgagatgaaaaataggtattcagtattattctaaactcttgctgttattcataccaattgacatttaataactaatcaaggcaatattttcgttttcctagagatttatcctgcaataaaatacagtctattgaaagacatacatttgaaccactaccatttttgaagtttatgtaagttacaaatataacttgattacatttggaatttttataaaacttaattataaacctctttgctattcttgaaatatgattaaaattttaccagtagaaagctactaaaattatacagcaaatcctttttgtctctagcaaggattattgtgagaattattacacagatcttagtgaatcatcagagagcagtggttctcaggtggtgtgattttgcactcaggtggcatttggtaatgtccggagacagttttggttgacaaaactgtgagtgtgctcctggcatctggtgggcaaaggccagagatgctgctaaacatccttcaaggtataagacaaacccccatggcaaagagttatatagtccaaaatgttgatggcactgaagttgtgaaatcctgttctagagaaataaagatcacttaacacaggtatttactgaacattcactgttttgtatctaatgcaccacgtgtgcagtgttaaagtataaatcataagccagtatcttccacagtcagatttccttagtgcatagagaaaggattgaggttatgttccatcctatataaattagaatcatggcaaatgataaatgttctgaaataattttttttttctttggcttgtgtcttttttttttagaaatcttagttgcaatgtaattacagaactcagctttggaacatttcaggcctggcacggaatgcagtttttacataagttgtaagtgaaatagaagatgaatacatgtaaacaactatttatgtacaaaaactcatacaattattgggtagctgggtataagcccattatcaactctgaaaagcatgtcttaagatccattcatttttctcaaatggggaagctaaggtacaaagaggccaagagacttatgtagcttatatatgacctcctctgcttgtcctagttctgacctatagcatgggcaagaaaaggcatcaaagaagtgaccctcaaattagccttgttgctgggcggggtggctcagacctgtaatcccagaactttgggagccgaggtgggtggatcacccgaggtcaggaattcaacaccagcctggccaacatagtgaaaccctgtccctactataaatacaaaaaaattagctgggcgtggtggtgcagttttttgctccctggaggactttgtgttaagcttccttccttgcagctaaatgttgcagacatctaagcagttagaaactctgcatatgagcaggaatcaaatccaaagttgtagggccagaatggtggctcatgcctgtaatcccagcaccttgggaggccaaggtgggaggatcactggaggtcaggagtttgagaccagcctggccaacatggcaaaacctcatctctactaaaaatacaaaaattagcaggtcatggtggcgggcacctgtgatcctagctatcgggaggctgaggcacgagaatggcttgaacccaggagggggaagttgcagtgagccgagattgtgccactaccctccaacctcccctccaggctggtctcgaactcctgtgacctcaggtgatccgcccacctcagcctcccaaagtgctggggttacaggtgtgagccaccatgcctggccaagatggtgtttatgttaagctattgtgcaaaaaaaaacttttgtaaagaaaatatatcgctgtatcttaattccatatactttcctgactactcttctaccataattgcaaaaattctatgatttctctgtataacatacccatcaaatcagagtgggtatattcagtggcctgaaggggactcaaggtgaagattctcctctacatctgactttagaaaagactttccacctgccttgtggttcagaaatctagtttcacacagttcatttcaagttagagggaggcattcaggatgtgtctggactagagcagcagtttctgcacatgctcccctctgtcctcattaatttgctgatgcataacttaggaaaagtacactaaaggtctgtttttcttttgccctcacaccagagaacaggctcattaggtccctccaccaagaggtttaggtagcatcaatacaaatgttttaaactcaccatctttactaagcactttataccactgggagtccctcataaaaatctggtggccgggagcggtggctcatgcctgtaattccagcactttgctgaggtgggtggatcacctgaggtcaggagttcaagaccagcctgaccaacatggtgaaacctgtctctactaaaaatacaaaaattaggtgggcatggtgacaggcaactgtaatcctaggtactcaggaggctgaggcaggagaatcacttgaaaccaggaggcggaggttgcagtgagccgagatggcaccattgcactccagcctgagggacagagtgagactctgtctcaaataataataataatataataataataatcatcatcatcatctagccagcttcactacaattatgtaggcaacaccaggaaaacactggaatcacagttgataaaaattaatgaattcactcaaaaacattcagagtgtcatgtccatttgtgccaggtactgtactaagtgctggggctacaaaatccatctcaaagacacaccaagatgaggactttgtccccaggggactttcattcctcaaggaggaagcggatgctgatgggaaaacatatgagagccatgtggggatctgtacggcagggtgacaaggagaggacaaagcaggaatgggggctgggttaagaaagacttgagagacactaacttgcttatcttgagtttctgtgttcatcttaaacaacagaaaaaggcatttgcttcatggtgatgaaaaaatcagagctagctgatattggaaactagcactcatttcatataaacagaatagagctgtacccttcaaactaagtcacagttactttcaaagattggcacaagggtctcaacacaccaagtgtatgttaggggctgggctccgttggagtcaaatcttcctggtaaacaaagctacactgcagtcatatttggcatatgtgacatataggcccactgcatttccttccaaaggcaagatgccaagggaaggtgccagtaattttatgaccaaaatgacaccattttgtggtgtttgtaagttgaaacaatatatttccctgcattacacaagtttataaaaaacaaacaaaaaaagaggccccagctgtggttgatcgatgatgaattgaatagagcctaaccttccaggcttctcacttgcacaggcccttccaaggtcctgggagggcccctggaaatttttgtagtcataatttttttaatgtttttactagataaggctcaggccccacaaaatcctgaaatcatccctgggttccaatagttacaacccagtaaatctcttgaatgaagcctctatgttattgacaaatactgactggccaagttagcagggttaaaaggtctgtctattttgaatctgaaatccatctcaaagacaggccaagagcttattagtggacttaactggattctgctggcccaagcgcagtaaagtcaaacaaccatatcgaggttttgcattggggaaaggaggacatttatttgcagggcatccaagcaagaaggaccaggcggctaactatcaaagtccctcactgaatgggggcaataatcatatctcttacagatgaaatcatgaatgaaatggtttatggaaaagcagcaatggttgataatcctaaatgttaagtatgtttatattttttccctgactttaaagtgcttctccttcattcctatacacaggtccagactgatggcttattttttaaaattctcttagtcacttcattggttctaacaataattttagaaactggatgactttgcaatgtagaaaggctatactttattcagatagagtacactcacatattggcttgtctatggcacatcgatatcatgccaagaatgtaagcactaagagagaataagaggaaaatccaggctttatccctattgaattatttatcccactattagaatattagtgaggtaggtgtggccacactgtgatggcaaattgagcttcggtcacaaacatgccttactgttccccccagtctactgacatcagcttcctttacatagcggtagatgcacaaaagtttgcacagttgagggtattgtcatcatgttttggtatgtactggaatcctggcagcttcttctctgattcggagaggcgcaaacattaaagacaaaaagaacaactcgagtctgtcctttggggtgatttagggtggctgtttaaatttgtagtggttgaaaagtcttgagattgtcacacctagcaactcttatacttttcttctctcagctgcagcttgttcttttcacctgtgtaacaagctgtcttctcttctcacagaagcttagcatttcatcctctgccccatagcattttttcaatacttaatttaccaggtgctgtttatgttgtaggcacctaagtacttatacaagtgagataacatgtccgaagttcttagaacagtgcttggcctatggtaaatgctccatacatgttacctcctatgatacctcattttcatttttccaacaactcttgcgatgcggttattattatcatttctattttgtagatgaggaagttgaaactcagagacgctaggtaatttgctaaggttcacatggctaataagtggcagaaccacttacaagctttgcaaataattttcaatgcagctcttagttcccctgtaataggagctgaatgatgacaatttggctttgtgcgcattgtgtcttactttctaacttgaataggacctgtagagcagtgagctccacttccctctgagaatcccacgcttctggagctcctggctgtaccagctctgggcatccccagggtttatgctcaccggtcagtgctggtgtgacatgatggctgagcaccggcactgtgtccagcgcattgctaggcactagacacgtgctctttcatttattcctcaaattgctttgtgctgtaaacgctacccagaaaggctcatgttcattactcaagtcacttcaccagaaagtgacagagccagaattcaaacccaggtctgccagattccaggtcccttgcttcttctgttgttgctcattgcaagggagtcttcttcaaggttattctcaggactttgattaagatacaggctcacagctgggcatggtgtctcatgctgtaatctcagcactttgggaggccaaggtgggtggatcacttgagctcagaagttcgagaccagcctggccaacatggtgaaaccctgtctctactaaaaatacaaaaattaaccaggcatggggacgggcatctatgatcccagctactctgaaggctgaggcaggagaatcacttgactccaggaggtggagtttgcagtgagccaagatcacaccactgcactgcactccagcctgggcaacagagtgagacttcatctcaaaaaaaaaaaaaaaaaaaaaggaaaaaggctcaccatttcagattctctagattttgcccctgaaaaagcatttacgtgatgcagtccgaggtcttgtatggaggagcttggtgtggggagatgtgtggctcacgaacctatgtaggtgaataaaggaaagaggttactttctccccaagtacatcgcgcatagtgggtgagggtctaggtcatctgcttatttctttgactaccttcttccatggaaccagttttccctgacagccttgggattctagcatagatcattttggagtttgtcatttaaatttattttcacggcctgctttggacattttttcagctagagctgttaggatttcagtacatttaagacagtgatgacatgctccagtcctttcatctctgtctcctcagttaatagaaaggaaacatagctcatctatctggacctgtacagaagaatttggagggaaaaaaaaaaacaggcaagaaatgttcccttattttgtgagctacctttattctgtcccattgttctacagcaaaaggcttgtataaaaatatttcagttttcctcatctaataaggcatatttaataaaattatttagagcagtacttcttaaacttttactctgagacagtctttgaggctgaaaaaaagcttgccacattttacttccataaagataccaaaaaggcgatggactgggagtcagtgcaccttagtttaatgtataaaatgaaggacttgaaccagaaatggaaatggtcatctactgtgaatctaaaaacactcgaggctgggcgcgctggctcatgcctgtaatcccagcaatttaggaggccaagacaggcagatcgcttgagcccctggagttcaagttcagcctgggcaacaaagtgagaccccaatctctacaaaaagacttttaaaaagtggaaacataaatataaataaataaaaacattcatatcatttggtttgtggaaaagagttgctgtagagtcctcaaacttgagccattgagccagttctcactcagtctctccatggcccaggcacaaccttagtcaagaaaagaatgccttagaacaggaggaaaagaggataatatcaaatggccctatattttgatttcattagggacaaatgcaaagatcctaatgtcagctggagaagagcttcctagttcagaggtaatgctgagctcaaggctatggatgagctatcaagaaagagggaaggttggagagtgagagaattttggaggaaagataacaaactttgccaagttgtttggctacatactgccttacagtcattatttttggtgtttagaaaaaaatagaaacagggtctcactttgttacccaggctggtctcaaactcctgggctcaagctctccttctgctttggcctcccaaagtgctgagattacaggcttgagatgctgtgcccagcctacattcatttttaatagctgggaggaaagtgggcagaggaagatatagaatgaaggggtagccgactttgtacagagcccaccagtggtcttacaagttttcatgccaaaaaaaaatcacgaaggatatttaaagccctagtttgagaatccatacttaaccagtcatgtagcactcacattctttctctttgtaacatcatcttattgaatattagtgttacaaaacaagttaatggcactgaaaaaccatctggaataggaagaggagggggatcacaaggcaggacaagctgtgtggctcccagcctcgccactgactcactctgatcttggtcaagggagagtgaatcttcactcctcttttttccatctgccagcatgtttggtcttctggcacctggtgttctatacagtacaacatgcttctttgtgttacattgagacttgatccacgtaccatcaacgcagtattataaagtgtacaattcagtggtggttagtatattctcaaggttgtatagcaaacaatcaccattatctaaccccagaacattttcatcatcccaaaaagaaacatggtacccattagccatcactccccagtgctgtcttcccgcaggcccaggtaactactaatctactttgagtccctatggatttgcctattctagatctttcatataaacgaatcatacagtatgtggccttttgtgtctagtttcttttcacgaagcatgttgtttctaaggtcctcccatgctgcagcatggatcattcctttgcaaggctgagtgatattccattgtatggagccatcactatatccgttcatccattcatcacttagtggacatgtggttgtttctactttattttggcttttatgaataatgctgctatggacatgcatgtactactttttgcgtggacatgtttttaattctagggtgcatccctagcagaattgctagatcgtatggcaactcttatgtttaactttttgaggacctgtcaggctgatttccacagtggctgctccattttacacttccatctgcaatgtttgagggtttcaatttctccgggtctttgtcaacactgtcgttgtctgtctcttctcatagccatcccagtgagtgtaaagtagtatctcgctgcagtttttgatggacatttccctaatgatttaagacattcaacatttttatgtgtatatgagccatttatataacttctttgaagaaatatttattcacatcctctgcccatttaaaaaattgatttgtctttttattgaattataggaatttctctatatcttctggatactctggatattagaccttaacagataatttgccaatattttctctcatcctgtgagttctgtgactttcttgccagtgtcctttgatgcacaaaagtttttaattttgataaaatctaatgtatctatttttcctttggttgtttgtgcttttggtgtcatgtgtgtgtataaaatgtcttattcttctttaaaaaggttcagtgtttggttttaaatcaggctgtgtccctttcatctgtctgacattcttgtcaccatgtcaggctgccttcagctagtaatacttcattaaattcaaaagacaaaattgttttaaaagaaaaaaaatccagtttggagaagaaaaaactgttgtctaatttaaggtcatgaaatttactcccatgtttttgtgtaagagtcttatcgttttggctcttacatttaggtatttgacatattttgcatcaattcttataatcgtgtgagatgtagggggtccaccttcattattttgcacatagatgttcaggtgacgccattgcactcaagcctgggcaacagagtgagactccaatggagacggggtttcagcacgtttatccgtttatcaggctgctctcgaactcctaacctcagatgatccacctgcttcagcctcccaaaatgctgggattacaggcatgagctaccatgcccagccaataaatgaaaactttttcactcaaaaaaacaacaattgtagtgaaaccatagatcagtttggagaatcatgctattattatctgcttcatgtttacagaatactccgttgaatttggtttgccagattttgtcaagcatttttccatctacattcgtaagaaatactggtctgtaattttttgtgtgtgatgtctttagtttggataccaggttaatatcaccctcatagaataagttaggaaatgttctctcctcatctgtattttgaaagactttatgaaggattggtgttaattcttctttaagtatttggtagattcaccagtgaggctgcctgctggtcttcagcttttcttagtggaaagttttttgattactacctcaatctctttacttgacataggtctgtctattcagattttctgtttttttctcaagtcagattcagtagttcatatctttctggtaatgtgtctttcatccagcttatccaattattagcatatattgtttatatgtataatcctttttattcatattataatcctttttatgtctctaagaacaatagtaatgtcccctctcatttctagttttaataatttggtcttctgtatttttgcagtgcagtggctcatacctgtcatcctagcactttgggaggctgcggtgggaggattgcttgaccccaggagttcaaggccagccagggcaacatactgagagcttatctctacaaaaaaaatttaaaagttagctgaacgtggtggcacatgcctgtagtcacagctactcaggtggctaaggcaggaggatcacttgagcccgggagatcggtgctgcagtgagccatgattgttccactgcactccagcctgggaaacagagtgaaaacctgtcttgaaaaatgaacagtaagaaaacaaaatgtttgtggccagatgcagtggtgcatacctataatccctgtactttgggaggccaaggaaggaggattgcttgaggccaggagtttgagaccagcctgggcaacatagtgagaccctatctctaaaaattttttttagttagccgagtgtggtggtgcgcacctgtagtctcagctacatcttaattttataacgttgtagttcagattaattccaactttgtttcaatggtatacaaaaactttgcttctctaaagctccactctcaccccctcctttatactgttattgtcacacattacatctttatataccttatgttcatcaactagatttataattattgcattatgtaagtatctttttcttttttttttttctttattttgggacagagtctcactctgttgcccaggctagagtgcagtggcacaatctttactcgccgcaacctctgcctcccaggttcaagcgattctagtgcctcagcctcctgagtagctgggactgcaggcacgtaacaccacacccagctaatttttgtatttttagtagagacagggtttcaccatgtttgccaggctggtctcaacctcttgacctcaagtgatcctccagcctcagcctcccaaagtgctgggattacaggcctgagccactgcgcccagccagtgctttttatttctttgtgcagattcacgttagtactccttatagggcaggtcttctagcaacaaagtctctcagtttttatttatctagaatatcttaatttctcttcaatttcaaaggtagttttgccaggtatagaattattggttgacagtttcttcagcactttgaatatgccatttcattgccttttgtcctccagtgttgtgtgtggttgctttgtttttagacagggtcttgctctgttacccaggctggagtgcagtggtgcaaccactcacaacgttgcagcctccacctcccaggcttaagcaatgctgtcacctcagcctcctgggtagctgagactacaggcatgcaccaccatgcccagttttttttgtttttgttttttttaatttttttttattgatcattcttgggtgtttctcgcagagggggatttggcagggtcataggacaatagtggagggaaggtcagcagataaacaagtgaacaaaggtctctggttttcctaggcagaggaccctgcggccttccacagtgtttgtgtccctgggtacttgagattagggagtggtgatgactcttaacgagcatgctgccttcaagcatctgtttaacaaagcacatcttgcaccgcccttaatccattcaaccctgagtggacacagcacatgtttcagagagcactgggttgggggtaaggtcatagatcaacagcatcccaaggcagaagaatttttcttagtacagaacaaaatggagtcttctatgtctacttctttctacacagacacagcaacaatctgatttctgtatcttttccccacatttcccccttttctattcaacaaaaccgccattgtcatcatggcccgttctcaatgagctgttgggtacacctcccagatggggtggcggccgggcagaggcgctcctcacatcccagacgggcatgcccagttagttttaaattttttgtagagacagggttttactctattgccagtgctggtatccaactcctggcttcaagcaattcttgagcctcaagcctcccaaggtactgggagtacaggtgtgagcaaccatgtccagcacctgcattgtttttgaagacaaattagctattaatcttattgaggatcccttgtatgtgatgagttgcttttctcttgctgctttcaagatattctgtctttggcttctgtcagtttgattacagtatgtttagatgtggatccctcagtttttcctacttgtagttccttgagcttcttgaatatgcagattgtttttcatcatgtttgggaagtttggggccatcatttcttcaaatattctttctccttttttctgtttttcttctcctgggacgctcattatgtgtatgttagtaagcttgatgatgtgttccacaaacaggtctctgagattccattcactttcattcatttttatttctgttcctcagagtcaacaatctcaattaaccttcaagttccccattctgtcttcagcctgctgtaatgtgccattgagaacctctaataatttttccatttcagttaccatacttttcaactctagaatttctatttgactcctttttatggtttctatctctttattgatattctctatttgatgagacattgctttcatactttcctttagttctctagtctacagaactgaatcgtttctcttatctctttgaacatattttaaatagctgaattaaatccttctctaggccaggcatggtcgctcgtgcctataatcccagcactttgggaggctgagactgaggttgaggctgaggccaggagttcaagaccaccctgggtaacttcgcaagaccccacctataaaaaataaaaaaatctttgtctagtaagtctaacatctggtccttctcagggacaatttctgcttatttctcccccaaccacgtgtttgggccatactttgtttccttgcatctttcataaatgtttgttaaaaattgaatattttaaataatataatgtagcaattctgaaaatcagatccatgctgccagggtttggtgttactcctgcttgtgttagtagttgctatttatttagtgacttttctgaacttcttctgtaaagtctcgcattatatgtcatgtgttcccactaaagtccctcctcggttagcttaccgatcaggtaatgattaaatgaagatttacttaaattcttggaactgataagtctcctagtttttgccaaggggctctgtgtacatgttggggcataccttcagcactcagctagacaatttacagccatgccttagctttcacttcttgcttgtgcagaacctcaaggtgtcagccaggggtgagagtttatgaacttagtaggtctttcctgaccatgctgacagtctgccctatgcatgcgcgtgacattccaaattgccaggaatatgtcttatggacttctagtttcccaagcatatatcagagtgtttcaaattcctgtggacatcttattcctcagcttttcctattaagctttttgattaggcttttttcccccaaactgttattcattgccgaatacagttgccatgttaaaacacttgtctgtaattgttttccaaaaacaccctctgtggagaggctttagcactagacagctttcattctggtcaaataaagacaaacctttcaaatgaggtcttccagggaaccaccagacagatgacatcatgacagttaactgagaataaggctttgaaggagctccagctccattctgctccctctggttggggatgtgggctgttttccaaggcgactactgagctagagggtgaggaatggtctaaggcaagttaacacaaatctcactgttcttacagaaattttttttgaataaatgctccttgggttgctgcaagactttggttacatttctagagttctgaaaaagtttattgtggtcaatttttttttttttttttttttttttttttttttttttgctattttttttggtatttgttgcttttatgaagggatgaatttttggatgtctctttttttttttttttttttttttttttgagacagagtctcactctgttgtccaggctggagtgtagtggcataatctcatctcactgcaagctccacctcccgggttcacacaattctcctgcctcagcctcccgagtagctgggactacaggcgcctgccaccacgcccagctaatttttgtatatttagtacagacggggtttcactttgttagccaggatggtctcgatcccctgacctcgtgatccgcctgcctcagcctcccaaagtgctgggattacaggtgtgagccactgcgcccagcctgcatgtctttattccaccattttcactgatgtcacttacgacatgattttaaatctctgaaggctcactgggcacatgcctgtagtcccagatactcgggaggcaaaggaagaaggatcctttgagtccaggaattctgggctgtagcatgctatgctgattgggtgtccgcactaagttcagcatcagtatggtgacctcccgggaaaaggagaccaccaggttgcctaaaaaggggtgtaccagcccagttcaggaatagagcaggtcaaaactcccatgctgatcactagtgggatcatggctgtgaatagccactgctctccagcctgggcaacacagtgagtgagaatgtgtctcttaaaaaaaaaaaaaaaagtctcattgaccatagactaataaactatttaatcatgggaaatgattaggggaaagacataaaaagagaaactgtaatccacttttttttgctctgtcgcccaggctggagtagagtggcttgatcttggctcactgcaacctccgcctcctgggttcaagcaattctcctgcctcagcctctgaaacagctggaattacaggcaagcactgccgtgccctgctaatgagaaattgtaattctcatagaggtcctcccagaggagtagaagaaggttgaaaggcacttctgtatttagtcttctcacaattaaggctgggcccagtggctcacaccagcactttgggaggccaaggcaggcggatcacttgagatcaggagttcaagaccagcctggcaaacatggtgaaactcccatctctactaaaaacacaaaaaatagccaggcgtggtggtgcgtgcctatagtcccagctatttgggagactgaggaaggaggattacctgagcttgggaagaggacgttgcagtgagccaagatcacgccactgcactccagcctggtcaatggagcaagaccctgtttgggtggggaggggaggggagtggaggggagaggagaaaggaaagaaaggaaaggaaagaaaatagaaagaaggaagggggagggaaggaaggaaggaaaaagagagagaaaaagaatgaagaacaaaaatgaaaattttttaaaaacctaaggttaaaataaaccctttttcttcatacagattaaacacgagttcaaattacagctttgctgcttaatagcttggtgacctaggacaagttatctaacctctctgtgcctcagtttcctcatttaaaaatagggcaataataatatctaccacataaggtatttgctgatcacaaatacctggcaacccagtagatactcactgtaataattattatttttataatttctgcctaagtacaaagatgattcttgggttaacctaaaggtagattttcttttatttcttcctgtttcttttatttttcttgttcaccttaaagaattaaaaagaaaatcgattccagcattttggaataaaaatttgcatcaaaatcaatttattcattttattgacatatgaacaaaatgtcatttgtttattcaataaacatttgttaaatgcctaatacatttcagacatcatgccaggcacggggatgacagggcatggtggcaggcacctgtaatcccagctacttgggaggctaaggcaggagaattgcttgaacctgggaggcggagattgcagtgagccaagattgcaccactgcactccagcctgggtgacagagtgagactccgtctcagaaaaaaaaaaaaaaaaaaaaaaatgtggtctctgccctcaaagcgctcatagtccaggagcctgacaagtggacaggtgattacatgcaatgtaagaaaggctgtgatgtcatacaagaagacaagtgggagtatggttttgaccagttcctcctcttagatttattccttcttctttggctataaagcaaaagaattggtcctatttttttttaactgtgcaaattaaaccataaattttaaaaactttataaagataaaagacaagcagccagccacagtggctcatgccagtaatcctatcagtttgggaggctgaggcaggtagatcacctgaggtcaagagttcaaaaccagcctgaccaacatggtaaaaccccgactctactaaaaatacaaaaattagctgggcgtggtggtgggtgcctgtaatcccagctactcggaaggctgaggcagaacaggagaatcacttgaacctgggaggcggaggttgcagtgagccaagatcgagccattgcactccagcctgggcaacaagagcgagactccatctcaaaaaaaaaaaaaaaaaaaaaatagatgaacaagttgaattatgatgagcaacttgaattatggaggatgctagaaatactgtttcctccacagtcagggcttcctaccaacatagtcacttttagggtttttgacctgaaaagttctgtggcatattttttctttgctatccactttttttttccttgtagttcttccccgcgttctatcctttatcttctagagaccttggtagttcccataggaatagtgctttacggagtctaatggtgatttcttaggtaaagacaggaaacatttttttcttttttacctacaagttccatatcaaaaaatgaatgtaaacttttcatgcagttttacacattgaaaatgcaggttattttaattctattccatttttcagaattctcaatcacaatcctctgacaactgttgaagatccgtatctctttaaattgccagcattaaaatatctgtaagtactatagtactctcatgagtcaagagatgatttatgctttttaaatttttcatcaaagcttaagtattttgcatttaggctaaaatgtcataatttaaattttaactgggttattgaaaaaaagttattggcgaagaaaaaaattaagaggatgtataatggtcaagacagccagcaggggaagagaacagcattgaagaacccatacagatttggaacatgtagacacatggaggaatattatttaaccaagaaagcaaaggggaaaaggtgttcattattctaaaaataaagaaaagagtaaataagatggtgagtgcaatatgaaaatgagaagataatggtaaaaaaaaaaagtgtcagttctgctcttgagtatcattaatttgatgatgcaaatcaacttttaatttctttaataagagctccctggaattctacagcaaataaagtcttgagctggcttgtttaatagagaagccaaaattgaattgttaggtacagaattttttattggggctcatatcatgaatgtttcggctttcttcttcagagacatgggaacaacgctagtcccacttacaacacttaagaacattctcatgatgactgttgaactggaaaaactgtaagttatttttttctgagatttatttttacttagttggttctttaggtttgttttattattttcttaagtcaggttcattgaggtataattttcatatagtaacattcacgctttttaagtgtacagtttgatgagtctgacaaatgtatagttacataaccaccaccacattcccaatataaagcatttctgatgcctcaaaaaggcccctactgtccctttgtaggcaatcccatcctcccaccatcagcccctgttagctactaatctgatttctgttcctatacttttgccttttccagaatgtcttataaatgaaatcatatagcacatagcctcttgtgtttggctcctttcacaaagcctaattttttttttgtttttgaaatggaatctcactctgtcgcccaggctgcagtgcagcggcatgacctaggctcactgcaacctccacctcccaggttcaagtggttctcctgcctcagccttccgagtagctgggattacaggcgcatgccaccacacctggctaatttttgtatttttagtagagacaaggtttcgccatgttggccagggtggtttcgaactcctgacctcaagtgatccgcctgcctcagcctcccaaagtgctaggattacagataagatccaccttgcctggcctcactcagtagaattttttttgagattatgctaccatccatgttgttgcacctatcactacagctggccctccatatctgcaggttcctcatccatagattcaacgaaccatggatggagaatatttggaaaaaataaaatatataaaacaacaatacaacaataaaaacagtagaaaatttaaaatacagtataattatgtacataccatttacactgtattaggtacttagagtatacctgaggctgtatacaaacattatgtcatttcataaaaaagacctcagcatctgtggactttggtaactgcagggggtcctggagccaatcccctgcagacaccgagggacaactgttcactcctttttattgctgagtagtattccggttgtgtggaaatgccatctctactaaaaatgcacaaattaggcaggtgtggtggcacatgcctgtaatcccagctactcaggaggctgaggcacgagaagtgcttgaacttgagaggtggaggttgcaatgagccgagattgcaccactgcactctaacctgggcgacagagtgggactctgtctaaaaaaaaaagtaagaaataaaaatgttttctgaagagcagaagtttttaattttgaccagctttaagttagcatttttttcttaaatggcttgtgattttttgtttcttacctaagaaatctttaagaacctgttgtctaatccagcgtctaaaagattttctcctatgtcttctcccagaaatgatacacatttaggtctatgatccattttgagtcaatttgcatatgtgatgtatcttttttattttttatttttttgtagaaatgaggtctcagtatgttccccaggctggtctcggactcctggtctcaagtgatcctcctgcctcacctcccagagtgctgagattacaggcatgagacaccgtgcctggccttctttgcaggatatatatatagatatagatatatatataaatcagccaggtgtggtggcacacgcctgtagtcccagctactagggaacctgagtcaggaggatcacttgaacccaggaagtggaggttgcagtgagccaagatggcaccactgcactccagcttgggtgacagagcaagaccctgtctaaaatatatatatatttatatatatgtacgtgtatatatgtatatgtatgcctgcagggccctattgtgagtttgttacacaatttactgcaacttcaattgtgccaccagcccccacaatatggcaagctaaatagagactcagttatgctagggctggttgagggaattttgcaagattagcatggaaagggcccttcatttagcactctgctccgttcatttttgtcaggtcactttcttatcttgaccaggttgtcagatctcttttactgctctagcctcactttcctcagcctcctgcagcatcttccccatcagctggatcccttcctctctggatgaagtccccttcatcgaccagctttctcacttagttctctaagatagtgaggatctgtctgcttttttcttgaccattattggataggaaaaatgctctcatcctctgtaatgatttgtcaccaaggccataaagacattgaactaactgtcttatgggagttcattattggaagtcttcaggagtttacacatttatgtacaaagtaagtaggccagctcatttgagtcttggctcatgtgtaatgatctttcatgtgtattgaaaaattattctcaagtatacctcaggtcatttacagtctcaaagacttgtcagtatactttaaaacaatcctgggaacagttctagattgaaggagactaaagaatcatgtactaagtgtaatgtctgatgtttgattggattctgaattttttaagccatgttatgattaggacaattgtgaaaatgtgtatacggaccgcatagtagacaatgataatatgaagttccattgagtgatgatagtcctctggttatgtcggagaatgccttggttcttaggggctgcacactgaagtcttcaatggtgaagggtcattatgtctgcaactgactctcaaatggttttgtccagaaaatgtatagacatacacacacggaaagcaaatgtggcaaagtattagcaactactgattccagatgaaagttatacaggtgttcattataccatttgaaaatgtttcccagccattctaaggcttaaaggaaaaaaagaaaatgtttaaaataaaaagttgggggcagaaaaagaataccaaaaattttgggctcatgcctgtaatcccagcactttgggaggccaaagagagagggttgcttgtgcccaggagttcgagaccagcctggacaacatggtgaaaccccatttctacaaaatatacaaaaattagccaggtgtggtggcacacacctgtagttctaggtactcaggaggctgaggtgggaggatcacttgagcacaggagacagaggctgcagtgagccaagattgcaccactgcactcagcctgtgtaacagagcgagacccggcctcaaaataaacaaaagaaacacctttgtggcagaggtaaggttgctatacaacaaaatgctgggttacggttccgggtccattccatatgaagatcagaggcttccactggacccaaaggaatactactagtcacttgtgattgttcctttataggtttgaaagatgtctcaggccaacttattggatgcagttttaatctaaaactctatacattgtacccccaactcacagacttcttgtatccatgaaaccctcttctgttttcatagtcttaatatggccccaataaagccatccttttggaggactcagaaaaggccccccacaacctctgcaacacaataattatagttaactcttattgagcactcactgtgcaccaggcatttttcaggtattgattcatttgatcctcaaaattcattagaggtaggtactattataatgacaaggccaaggaacagagattaaacaatttgcccaaattcacattattagcagagctgagattgaagcatagtctggctatggaatctgtattcttaatgaccatgctatactgcctaagattaaccttttacttcagttacagggattgtttttatctctctgaaagtgcccccaataagccacaacaataaattaatcaattgtctcggtcacctcttttgcccaaatttacgtattggaaaaaattcaaacaagccagaaagatgaaagaatagtacagaatccaatcaaagatcaggcactgcatgtcatgtcttcatttcctttaatctaaaacatgcctctactttctttgatcttccatgacattggcattttttaagagtcaaagatagctgtcttgtaaattgtcccacaatccggatttgtctgtttcctcatgatgaaattcaagttaagcatttttgggaaaaatactgcataggtgatgtatccttcctgcctcgtaaccgcagatggcctgtaatactaagtttgatcacttgactaaggtgatcttccaggtctctccattgtaattattttgctggctacagtggctcccacttgtaatcccagcactttggaaggccgaggtgggaggattgcttgagcccaggagttctacaccagcctgagcaacatggggaaactctgtcactactgaaaatacaaaagtacaaaaaaaaaaaaattagctgggcatggtggtgcaagcctatactcccagctactcaggaggctgaatttggaggatcccttgagcccaggggggttgaggctgcattgaggtataattttgccactgtatttcagcctgggtgacaaaataaaaataaaaataaaaaataataattttccccttggtaattaataaataatctgtgggttgttactttgagttcagtgaagatcctgttctcaaatgttttttcacccaaatgtgcatcaatgataatccttgtctgaatgaatttgtattacactgacggttgcaaagtgacacttttaaaaattctgtcattccttctacatttactagctggcattatttcattgaagaagaactcctcctctttctttttcaatatcactcttcgtggattcttctttatattaaatatgtggtaacttattgttgttattcttttgaatgctcaaattgtccagatttgaccaatgcagtctttgttattttttaactccgcaatccaggttaaactatttttaatgcccagagtaatttataatatttcccactcccaacaggaattgagaaagggactccagaagttgggggcttattcagacttcttaaaagtctaccttcttcctctgtactttcagcccaaagtgagacttttgaattgggaagagatacttctgaaactactaatcactgtcacccaattctaatcccaaccatctttattctaggcataccatactcactgccatgcttacccttcagttgggcacttttgtcctccttcctattggtcttctggttcctacccaactgtccagtccataggcttcaatgacacctttttcccacacctgtggtagcgttggctgcctcctttacctactcaagtaaccgctttaccgctaatttattgctctctgttttcatctataggatcttacctagccatatggcctgctgcctctgccaatttaaaaacagcattgaggctgtctgcaagacagtcaagctgcattgcaacagtgcatgtctgacaaacaccacacattgtcgtgagtccaaattgcgcggtgataaattgttacattaagtatttgtttttaaactttttatttttaatgatgataaaattttaagctaatgacataattgctttatttttatttactcattcagagttaaactccctcaatttccgaactactcccttgctgaaagtcaggttctcagttactattacaaaatttaataatagaactgttccatatgcagaaaggaccaagacaaaggaatgggaaggctagggaataacattaacatccacacactgtatactgtgctctctgcttgatgctttgcccacagtgataatttcttcatatagtgcaatgtagtttgtaagctggttttaaatccatgagatctcaagtactctctgccttataggacagatgtagatacggttttggtctttctgtttttacagttttataagagtacaagtgatgctgttttatttgaagcctgagagcttctggttccataaccagaaattgctacctggctcttctaatggaatggagggcttttccattcttagaccatccaactctgaacttgctccgaatctcaaacctttctgttcacagaacaaacgctcaagggctttcaagagtgtttctgtagattaggcttattagcatcaacttcatgacttctaaaatgtgactgctttcatgtccagatagcttgaatacaggtatctaccagtgatatggggtggagaattaataatgcttggttacataaagtcagtgttgcttatttttcaaaacttttttttttttttttttttttttaccaattatgttattcccttctccccaagaagtgggcagaaaagctttgttaacctccttttacagatgaggaaaaacaagatcagaggtgctaagtgctgtagcctagtgccaggtcttctggccccaattctgggttctccccaagcccatgtttcttcccctttctcacaatctttacttcttcctctgaccctcaccaccacccaaagtacttttaattccagaaaagaaacccagctgcacactggcacacctgaccttcatgcagtcagaagctttggatgattccccatccaaaatattagagatgaaatgaaagcaaagtaggcatctgacaaaagttgctttttcccttctgcattttaggacctcaagtaatgtttatccagaaactgctatcataccagggattcattgtgtatttaacaacataggcatacaatctggcaaatttgaaaaactcttaacatacaccccaaatccctgcccaaatttaagaactagggtggacacagtgcgtttttccatgtcgcatcttctgtgatggggctacgatacgtgggagcagagaatggggagggtggagcgcatgccagatgaggatctatcagcaatgggacggggcctccactttagcatctccaccctgctcctctcagaggaccgcctttcattgcattcagctgtgatggtagcacgaacacaggtgcaccgaggacgaggagagcaggagccttgtgctctctctgcatctgaggcaggacagcacagggtacggagcagtctgcagagaggccagctcatcagggaagcacttgtcttccaccttgggctttgactgagcactgggcaattggcctctggggatcaacgaaataatcctaaacagagttactctatgtcacactatggaatgttccaagtaggtggccgtgttttcaaaagatgtattttctccttttgttgttgccatttcataggtttaggattgggtgtgtgtttctcctctctgaatggcactcgaatgtttgctgactcctactctgtgtgactggggtgtacagctatggactgatgcatcccatcccatcatctttcatgatcaaagcagtctcttcttttttgacagctgaagaagcatcggtagggaatccagaaggagcgttcatgaaggtgttacaagcccggaagaactacacaagcactgagctgattgttgagccagaggagccctcagacagcagtggcatcaacttgtcaggctttgggagtgagcagctagacaccaatgacgagagtgattttatcagtacactaagttacatcttgccttatttctcagcggtaaacctagatgtgaaatcactgttactaccgttcattaaactgccaaccacaggaaacagcctggcaaagattcaaactgtaggccaaaaccggcagagagtgaagagagtcctcatgggcccaaggagcatccagaaaaggcacttcaaagaggtaggaaggcagagcatcaggagggaacagggtgcccaggcatctgtggagaacgctgccgaagaaaaaaggctcacgagtccagccccaagggaggtggaacagccccacacacagcaggggcctgagaagttagcgggaaacgccgtctacaccaagccttcgttcacccaagagcataaggcagcagtctctgtgctgaaacccttctccaagggcacgccttctacctccagccctgcaaaagccctaccacaggtgagagacagatcgaaagacttaacccacgctatttccattttagaaagtgcaaaggctagagttacaaatacgaagacgtctaaaccaatcgtacatgccagaaaaaaataccgctttcacaaaactcgctcccacgtgacccacagaacaaccaaagtcaaaaagagtccaaaggtcagaaagaaaagttatctgagtagactgatgctcgcaaacaggcttccattctctgcagcgaagagcctcataaattccccttcacaaggggctttttcatccttaggagacctgagtcctcaagaaaacccttttctggaagtatctgctctttcagaacattttatagagaagaataatacaaaacacacaactgcaagaaatgcctttgaagaaaatgattttatggaaaacactaacatgccagaaggaaccatctctgaaaacacaaactacaatcatcctcctgaggcagattccgctgggactgcattcaacttagggccaactgttaaacaaactgagacaaaatgggaatacaacaacgtgggcactgacctgtcccccgagcccaaaagcttcaattacccattgctctcgtccccaggtgatcagtttgaaattcagctaacccagcagctacagtcccttatccccaacaacaatgtgagaaggctcattgctcatgttatccggaccttgaagatggactgctctggggcccatgtgcaagtgacctgtgccaagctcatctccaggacaggccacctgatgaagcttctcagtgggcagcaggaagtaaaggcatccaagatagaatgggatacggaccaatggaagattgagaactacattaatgagagcacagaagcccagagtgaacagaaagagaagtcgcttgaggtgaggaccacacagaaacatgagacccagatttcccatcatttagcatatcccaggaaagtgcccacacagaagagtctgggactcccaggccatagcttatcttggccatgtaactttggtcatgacagtgatctcccactttgctcatgtagagagagaaatagattagggcacaagatgaactgtaggccgggggtggtagctcacgcctgtaatctcagcactttgggaggcgaaggtgggtggattacttgaagtcaggagtttgagaccagcttggccaacatagtgaaagcctgtctccacaaaaaataagaaaattagctgggttgatgacacgtgcctgtagtcccagctacttggaaggctgaggtgggaggatcacctgagcccagggaggtcgagtctagtgaacggtgattgcaccacggtacccaagcctgggtgacagagtgagaccctctttcaaaaaaataaaaaagaacctgtcagctactcacctggaatactggggttttgaatagttagctctcattctggtttttttttgtgtgtttttttttttagctcaaaaaagaagttccaggatatggctatactgacaaactcatcttggcattaattgttactggaatactaacgattttgattatacttttctgcctcattgtggtaaggacaataattaattcaggttttcagaatgcagtcctgtctttgtgtggattcagagctcacaaactgaaaaccaaagccactttcccacctgctgctacttgacatacttcttcagtcatttaaggctgaggtgtatgctttgttcttttattgcagtgtatatttcaggatttttaaaggatcctcgctttcagatctctgtgaattgaaaccaagtgaatcccactagactattttaagaagtcgatataatagcaaaatttctcccacccaaaactatgtcaacaattggatgtactcatcaagtcacccttactctgccactaatttatttccttgttgctgaaatgatgagagaggtataatctccaccctcacggagttgtcatcaccctggagaggaaggagagagccaaaagacatacgtattgtcttgtagacttattagatttacacagtatcatcctccagtgtgtaaggcattgtctaaataggtccagttaaagcactacagagtagccatcttttacaaaaatttttggccacatttttaagttcactggtgaggaggaacgtctcatactctagccctcctgagcctataccctctgtgagatgtgtcaccatttcttggacaccatgtgagacattccccctcagattagagatgctcagcttgcatcaacttacctaaagcctacatctggctactctgggacaagtcctgtttacagtgcccattcctggagcttgcctctgtcttttgttcgattacatgatgtattacttttcccaacaggccagtgctagcatattggaagagtgatttaataaagctggcaaccttgacgctatgctaccagtccaaccttacttgcctcatttaccatttccattattgtggcagccctccattccagccacagcagcccctcaccaaaccccagtcacaccacccacatttctgcttttgtctgtgtgtttgtccatctaaaatgcccttatttcactctgcctgtgggagtcctatgcatctctcaaaagccaactcaagttcatctttcttcttgacaccttccctgaatattccagccctgctgagcctggtccctttgtgagatttgtcaccatttcttggacaccatatgagagacttcagaggctgaagtgggaggatcgcttgagcctgggaggtcgaggatgcagtgagctgtggtcgtaccactgcactctagcctgggcaacacagctaggccctgtcttaaaaacagccaccaccaaaaactatcttgggatttgaataggattacgttaaatttgtagattaatttgagaatttacatctgtacgacattctaggaacgtgctatctcatgtcatgtattcatttcttgttaatgtctttcagaagagctttagtgtttccatatatagatcttatacatcttttgttagataaaagatctttgtatttttgttcctaaattcttcatacatttgtattgccattgtaaatgggatctttcttccattttctaattagttattggtggtacatgggaaaagtatttgaggtttgtgtgctgatttcttgattttgtagatagccactgtattgaattctcattacttccagtaaaatcttagttgattctcttaggcttctttggctaacatttatcatttaatatgcaaataatgatagttttgtctcttcctttccaatacttctactctttccttcctttcccttttcctttttcctttcctttcctttccttttttttcccttctcagggccttgttgtcacccaggctggagagcaatggtgtgacctagctcactgtaacatcaaactcctgggcttaagggatcctcctgcctcagcttcctgagtggctgggactacaggcaggcagctaatttaaaaaatgtgttcgtagagacaaggtcttgctatgttgcccaggctggttttcctgccacttcagaggaaggactcaggtttcctttttctcctacttttaagagtttttattaggaattatctgttgaatgttatctaaaacagtcaataaaatgtattaagtgccagctgcatgcaagaccctaagttagatacagtcagccctcttcatcagcaggtccacatcttcagattcaactagatcaggctgaatatttgaagaaaaaaaaaccaataaaaatacaaacagaaagtacaatataacaactgtcaacaatgtacaatatgtatacattttattagtgatgacttaaattacatggggccaggcatggtggctcacacttgtaatcccaacacattgggaggccaacctgggcagcatagtgagaccttgtctttattaaaaattaaaaaaaaaatagccaggtgtggtagtatgcacctgtagtctcagctactcaagaggctgaggtgggcggatcactggagcccaggaggttgaggctacagtgagctgtgatcgtgacaccgcactccatcctgagtaacagaggatgacactgcactccagcgtaagcaacagagggcaatcctgtcgctaagtaaataaagtataggggggatgcgtgttggttataagcaaatattacaccattatatgtaagggattgagcatccacagattctggtatggtgtgggggcggtatcctagaaccaatcccccgcaagatagcaaggatgactgaactatggaagaatcaaagcagtgttacacagcatacaattcctgtcttcaaaaaagttacctcatcaggtacatgagacttataatgaataaaaggaatcaatacagatttggagatggtggttgttgtcatagataatcttaattgcgttttcttctaaaacagatatgttgtcaccgaaggtcattacaagaagatgaagaaggattctcaaggtaaatattagtctggtgattttttttttcttctcttttgagatggagtttccctcttgttgccaggctggagtgcaatgacacgatctcggctcacggcaacctccacttcccaggttcaagcgattctcctgcctcagcctcccgagtagctgggattacaggcatgcaccactagtctcgcgacgttttaattagaattttagaattagaggagggcttagaactctgccctcatttttcagtgaggaaactgcccaagacaggacaaatacttaccctaatgcttagcctggctccagtgaaattagctccccagccaaagctgagctggatggaactaacaaggacacacctgctgtccccagccctttcgggaggtggggagggataggaaggagaaaggttttggtgcctattgctgctgatggtgggcatcaggccaggccaggggccttcttggaggctctgggaaaggggaagggaaggccaccgggtgtgagagagagggcacttgtctccttcaaggctgatggaaggtaggatatgcgagtccttcctcttaagtggcaggaaacagtattttctcttttatttctttttttttcccctggatcctagaactgaggaaacactattttctcatcttactggtttttgggcccctactctattccttttatgcaaacctcacagaattttaaccagaaaggccaggcaggatggctcacgcctgtaatcacagcactttgggatcacttgaggttaggagctcgtgaccagcctgaccaacatggtgaaaccccatctctactaaaaatactaaattagctgggtgtggtggcgcaggcgtgtaatcccagctacttgggaggctgaggcaggagaactgcttgagcccaggaggcgcaggttgcagggagccaagatagcaccattgcactccagcctggggaatgagccaaactgtctcaaataaaaaaaaaacaacaaaaaagaattttaactacggagaccttagatagtagtttgtccttttatgacaggaaaactgagaaggagaaagggagagtgtcttacttaccccatggtcacacaatgcactctgccttttcctattttattcaaattcaaaaataacatgttgtgctttaagctgatttcgtagctcactcactcatcagcgacagccagccatatgaagactgtgagatagagaacttggctagctgcactcacgcatttgcttgaggtgatccaacttatagaataaagtatctagaaaacgaagaaccacttcatctcccatcccccatcaaatgatgcctgtgagactaagtccgaaggggactgatataaaatgcttctgcccagcatggttgtgcagtttgttcactgcacaagggcacttggccaagggagtgagtgggactgaaaatcctgcccctgctccatgctgagccacatacaaagtccccccagtatattgtggggcccttctgggcagacatggagagcttctgaaagtcccacatgcatggaattattttcaagaccccgggtatgtggtctgtggtggtggttctccctgtgattatggactgagatactcatttagtcctaataagaccagagaagtacattgtgagatacgtgggaaacggctgcatcactcactgtcttgtgcatgtgtctccccaggggcattttcagatttctgccatggaggggatgctcttcgcgaagggagagtcaggtacattggaggattcattgctgtggccagggaaagcagaggacatgcaaaattaatatttccctttctatcttctaggatggactttcctcatttggacagccgctctggtttaaagatctgtacaaacctctcagtgccacaagaataaataatcatgcatggaagctgcacaagaagtcatctaatgaggacaagatcctcaacagggaccctgggtaaatgatggggccctcacagttcccatctaaaatgaggagggggtgagaagcttaattgctcctttcaagaatgaaaaccttggcattgttattcttatcccagggacagcgaagccccaacggaggaggaggagagtgaagccctgccataggaggagaacacagcccacctcaggcctcctgcaaaaatacatagaataaacaacaacagttactaaatgaatgaaaattgtgattccgatgaagcctgccagagaaacaaagcattttttaaaagaggaaataaggtgatatctgattagggcaaacatgatgcagacaagaaatgcaccggttcagaggagggaaggtcaggccgcctggggagagtccatgaaaaagatggaacgtgccagatgctgtacctggtgctgggaaagagttgactaggccagcatccctttcctcaaagggggggctcctagactggggggagggctggacatctgaatacatcctgaggagacagtgtgggacagcatggtggcagtggaaccagccgtggttctgctcttggtcggctggaaaggagtagatgtaagggatggtttagaagaagggaagtggaagaaaagttttctgagctgacaagaggaaggaaaggccgcctagaaggacactaaaaaggcaagagaagccctaagcagagtgagcaccagactccacaggttaagggctcagtcacacagaaccatccgcatgtcagaccccaggtgcaaggccaagcatcacctatgcatctgaccaactggctgtaaattggaggtccccacaactccctcctcaggtttgaacatttgctagaacagctcatggaacccaggaaaacagttttcttactagtgctgatttattacaaaggatattttaaaggacacaaatgatgaagccagttgaagagatacacagggtgaggtttggaagggtccttgtggagttggggtgcaccactctcctggaacatggatgtgttcgccaacccggaagctctccaagtcctgtcttttaaggagttttctggaggctttatcacgtaggcatgattgagctccagctctactccccacgccagaggatggggaatggggctgacagcacaacgcttccaaccataggtctttttggtgaccagtccccaaataaggagcccaccaagagtcacctcatgagaacaaaggacgcttctatcacccagaaaattccaagggatttaggagctctgtgtcaggaaccaggtttaaggaccaaatgttagaacaaaagatgtgcaaccataaaaaacagcgagatcatgtcttttgcaggaacacagatggagctagaggccattatcctcagcaaactaagacaggaacagaaaaccaaatactgtatgttcttttaagtgggagcaaaatgatgagaactcataaacaacagacactgggccctacctgagggtggagggtgggaggagggagaggagcagaaaaaactattgggtactaggcttggtacctgggtgatgaaataatctgtacaacaaacccccatgacacaagtttagctatataacgaacgtgcatatgtaccccctaacctaaaaggaaagtttaaaaaggaaaaaacacctaggagaaaagaaaaatgataaattaacaaaggacaatgctcttagcaccgccatcattcaggaatttccaagggttttaggagctttgtgttaggaactggggtcagagaccaaatatatatttcttcttatgttacactaccccagataggaaaacagaaattactctagatatttcaaacaaaaaagggttgtatataggcaattagtgcttatcactggaggtgctagaggtggtgaaggttgtggggatggggttgcaccactggctttcaggctactttaccacagctgatttccagaggatggaagaagtcaggaaacttgggaaaccgctgctgaggtccttgcagccccacggtccccaggctggtgactggtgggggagtatggagtccagctgaccaccagagcctgcacacctgctgctatgggggaggaaaggatgacttctacctcctttccacattccaaattccacgtgactacattttattggcagcaccccgctggcaagtgagccttgatgtgtgcttcctgggcttctggcacctgcacagaaaggggtgaaatgagtgtcacgagcagccaccactctgcatcacacctccacatccaggtgtgctggagagccccacttacacttggagtgtcctggtgccctacccacttttggtaggtgtttgggtgtctgaggctttgcaaaagaagaaggtggggagtctatggtggagtcacatggtggagacctagctaagtcagaggcctggagaggtgtcactggctgggcagcaggtaacacacaatcatcctgagctgattggagaaacacctgggattgattcagagttttttctggaatgttttcactggaatgaaagctgagcggtctgcaggccatatagtattggagaaaacttagccctcattgaaaaaggctgccagagaaaaggtatccacagggaaattcaggagttttgtttgtttttttttctttttttttttcttttaaggtggagttttgctcttgttgctcagtctggaatgcaatggcacgatctcagctcactgcatcctccgcctcctgggttcaagcaagtctcctgcctcagcctccctagtagctggggttacaggcatgcaccaccatgcccggctaatttttgtatttttagtagagatggggtttcaccatgttggtcaggctggtctcgaactcctgacctcaggtaatccacccgccctggcctcccaaagggctgagattacaggtgcgagctaccgcgcctggcttgttttgggttttggggttttttttgtgttttgtttgtttgtttgtttttggagacagtctctgtcacccaggctggagtgcagcagcgtgatctcggttgactgcaacctctgccttccaggttcaagtgattctcctgcctcagcctcccgaatagctgggattacaggcacccaccaccatgcccggccaatttttttttttttttctaaaaacagtttcaccatgttggccaggctagtcttgaactcctgacctcaagtgatccgctcaccttggcctcccaaagtgctgggattacaggcatgagtcactgtgccccgccaggaaattcagtttctgaaaatacacctgtggatctctagcctagaaaaagggacctcttttattctttttttttttttttccagagacgggcctcactttgttgcccaggctggttttgaactcctggcctcaagtgatcctcccgccttggtctctcaacgtactgggattacaggtgggagtccccgcgcccggcaaagcctatattaaacccttttatgcacactcggcggtactgcagagagggcagggaggaagcagaggtgccctggcatcttcagctggaggtgagcagggcgctgagggtgggagaggcccggcgcctggggatgggaggcaggactgcaccttcacagggacgcttccaccctaccccggaggtcagggcctctcgcccagctctggctctgaggtcctggagggagggagatgctgttgcgactcagaagattgggggagggccacccccattcgagaagagtgaaaatcctgagcctgaagaagtggaaccggttggagccgaggctttagaggatggcgttcgaaagagggtctggcgccgccctgtggaccgttcgggctcgcagggccgaaggctccgaagactgagacctgtgaaccatggggaggctccatgcggatgggggccacagcccccgccggagcccccacactagccctggacttctccactggcttacgacatgagagctcaatatgctccttatttaacgcactgttgtatcaggtccctgtgggagccactggctctatagcctaataaaggagcgggtgcacgcactggattggtgagctaccgccactgcaacgcgtcctaatcaaccatcctaaacggcggctggaacaaggttctcgcaggcctgtgcttgggcttgaacgctggtccagccgctgcgctctgtggctccctgtaggcctgcggatcggccagggggctccgttccttttgggcggaggctgaagaagcagcggctgcaccagagaaggccctctgggtgaaggtgggagcgcacggggcccgcggaaccacctaaggcgacttcagacgtgggctcggaactggcagcctttcgtttctgcttcattccaaggccagagcaagccacgtgggcaaacccaaagccaggggacaggaaagtatcctccacccacaacgaaaccatggcaagcggtggatgcaggtacggccaatagtctatctatcccggtgagtgaggagacctgctttgagggttgcacaacctggatctgcttttacagtggtgtctgtcactatgaagactccaccatgggtcgccatcaggtcagggaccctgacaaggcaagaactgcatcttcctctgcacacagctctgctcccttccccgccatgcctaacaccaagcctagccctgagggatgactcaggaatattactgagagcattttaggccattccttcattatccccatgtgacttgttatgaaatatagactgacttcctgaagatcagcacatagtgctaagtatttggcttgtaatctgtagagactctgccatttggagctgggatctgtccccagagctgtcagacaccaaatcccgtatctactgccacccaaagggacctccagaagaaaggggttatacagggtcaaacaccaaggcaggttagtgaaatttctctagaggccatttaaagctggagtctcaccacctgaactgccctcagaggaaggctgtctagggcacaaacctagtcaggggtccacatggacttaaggacaatttttttttttttttttttttttgagacagtctcattctgtcatcaaggctcgagtgcagtggtgtgaactcagctcactgcaagtctcaacctcctgggctcaggtgatcctcccacctcagcctcccgagtagcgggaaccacaggctcgtgccatgatgcccaattaattttcttttaaattttttgtagagatgaggtctccccgtgttgctcagtctaatcttgaactcctggactcaaatgatcctcctgcctctgctcctcaaagtcctgggactacaggtgtgagccaatgcacctggcctcttatgaataattttaaaaacaatgaggttcaccgtcagagcccctgctgctctaccaagtcccttggcccctctcaacagggcaaaagcaagatgagccccagatgttctgcttaatgaccacctttcccaggagactttgctctttaaaggagaaccacttagagatatgagcaaccttaaagaatgccaccagcactagtgaatgccaggcacgggccacgtgggtggagagtatactttagggcagtcactcatggtaaattatttccaccagcccccagaagtgactattcaatgtccaactatgtcaggcccaggctaataaaagtagaggcatgaggaacctagggttgttctgaagtgccttgattatggtacatgtggaagattttagagcttgttgtaaaaagtgatgacccatggccccccaggctgggtctgggattccctttgtggattacaagaggatattatgcagcagtttttaaaaatgaggcagactgggacaatctatctccaagatgcataggtgctgttaagggaacaaagcaagatttagtagggcgtgtatagtatgctactgtgcgctgtgcgttatctgtacagaactgtgaggtctgatacagtagccactagccacatatggctatttacatataaatttaggttggccacagtggctcatgcctgtaatcctagcactttgggaggccaagtgggaggatagcttgaggccaatagttcaagaacaccctgggcaacatagtgaagccccttttctacaaaaaatttatttatttatttatttttattttttttgagacgggtctcactctgtcacccaggctggagtgcagtggcgcagtctcagcttattacaacatctgcctcctgggttcaagcgattatcgtgcctcagcctccaagtagctgggactacaggcacgcaccaccatacccagcaaatttttgtatttttggtagagacaaggttttgccatgttggccaggctggtcttgaactcctgacctcaggtgatctgcccgcctcagcctcccaaagtgctgagattacaggcatgagccactgcgcccaggcaaaaaatttaaaattgtaaaaatcagccaaacatggtggcattcatctgtagtcccagcaacttaggaggctgaggtgggaggatttcttgagcccaggaggtcaaggttgcagtgacctatgactgcaccactgcactccagcctggacaacagagtgaggccctgtctcaaaaaataaataaataggagtttgaggccatgttcacacatcactgcagtccagtctggtaaacagagcaagacgctgagtctttaacaaaaaaaaaaaaatttttaaagtcagctgctaagacacactagccacatatcaagtgctcaactgccccgtgtggctaatggcttccaaactggcagcacaggcaactgttttcatcactgaagttctgttggacaagaatacctctggaagcacacacgagaaactggtaatggcggttgccttccgggagggaaactgggagagtgcagggctgtatgcccttttgtacctcttgaatttcatatcatgcgtttgtactaggtgtttacaaattattttaaaaacatactgggaattaggaatccccatatggaatcactgcagtgggacactgattcccaaaaaattactttgcaatttgcctaaaacaaattaagctaatagctatcatgatttcatatttaatattttttcacagcttagagtttttttagctcctgttgctatctctctgctcttatgagctcacagggtgacaaagtgaattagtaagtagcaggagaacattaaaggaaaaactcctgggcaacagggcaaaacgccggctctacagaaaatacaaaacattagccaggcatggtggcatgcacctatggtcttagcgacttgggaggctgaggtgggaggatcgcttgagcccggaaggcggtaactcaatcccagcagaatcccagggagcgaaggtggctcatcccaaaagaaaaacaagaaggaaattctattaccagaagacaaagggatgaaatgagggatggagaatcaaagactgaagctactagggtttgtttttattaatatttaattttttcagaggcgagggtctcagtatgttgcccaggctggccttgaactcctggcctcaagcaatcctcctgcctgagccttccgagttgttgggattacagatatgagccactgcatccaactttggttcttgtttgtctgttttgttttgttttggtttgtttttttgacagagttttgctgtgccacccaggcagtgactcagcctcggctcactgcagccttgaccttctggcctcgagtgatcctcccacctcagcgccaccccccactgccctccaatatctgggactacaggtgcgcgtgaccgcacacagctaatttttaaattttttgtagagatagggtttcactatgtggctcaggctggtctccaactcctggactaagcgatctgcctgccttggccacctcccaaagtgtgagccaccatgcccacccattgaacattgaagctagactgggcaaacccttaagcctaaaccagtaacagtttttcacaagttcatagatgttactgtggttaataacacacaaattcatttaaaagcatgtgtgtccacatagtaatttttggtccttatttttatttttatttttcagttaatggatattaaagatacaactttattttgttttttttgagacagggtctcactctgtcacccaggctggagtgcagtggcatgatcagagctcattgcaacctccacctcctgggttcaagagattctcctccctcagcttcctgagtagctgggattgcaggtacatgcaaccacacctggctaatttttgtactttttgtagagatagggttttaccatgttgctcaggctggttttgaactcctgagctcaagtgatccacctgcctcggcctcccaaactgctgggattacacaagtgagccaccacacccggcctaaagatataatttctatcatgaggaggtccaagaactattctctttttctttttttaatgttagaaagggattaactgggtatgtgctgcagcaaagggaggggaaattaagcaagaagagaagggagccaggaaataaaggccccaacccaggaagcagttaagcaaagttccaggatgacccatgtgacaagtttaggggataacttgagcacatggaggacagaacttggagagggcactgtgggcctgggcgccacctgctccgccagagcactggaagagaacgagggcacgataatggcagatggcactgaaagaaaaggagagagcttgaggcacccttgggggaagcagccatcatcagagtgtattttatttttattttattatattttgagatagagtctcactctgttgcccaggctggagtgcagtggcatgatctcggctcactgcaacctccacctcccaggttcaagtgattctctgcctcagcctcccaagtagctgagactacaggggggcaccaccacacccggctaatttttgtatttttagtagagatggggtttctccatgttggccaggttggtcttgaactcccgacctcaggtgatccgcccaccttggcctcccgaagtgctgggattacaggcgtgagccaccatgcctgacctcacagcacattattaagctctgtggtgaataatatttatatagtcacaattctgtaaacactgttcattttctacaaattgtggcaaacccaaacctcaagaatggacagggctagggtgtaaaagagctaagtccttgccaggtttaccaggaaggcaacagacagtgtctaaaactatgagacagctgggcgcggtggctcacgcctgtaatcccagcactttgggaggccgaggcgggtggatcacgtgaggtcaggagtttgagatcagccttgacaacatggtgaaaccccgcgtctactaaaaatatcaaattagctgggcatggtggcaggtgcctgtaatcccagctattagggaggctgaggcaggagcattgcttgaacccaggaggcggaggttgcagtgagccaagatggcaccatgcataggttttatgccaatactacaccattttatatcaaagccttgaatatccaaggattttggtatctatgggaggtcctggaactaatcccccacagataccaaaggatgagtatacaccttttcttactttcgaattttgaaccagacagatacgctgcaattcaacaaattaaaataactgaacctacaatcaaggagaaaaatatttatccctaataactaatggaccatcttacgccgtctataaaaatatcaattaagaaatcacggccgggcacagtggctcacgtctgtaatcccagcactttgggaggccgaggcgggcaaatcacttgaggtcaggagtttaagactagcctggcaaacgtggtgaaaccccatctctactgaaaatataaacaaattagccaggcatggtgacgggcacctgtaatcccagctactcgggaggctgaggcaggagaattgcttgacccaggaggtggaggttgcagtgagccgagatcacaccacttcactccagcctgggtgacagcaagactccgcctcaaaaaacaacaacaacaacaaaaaacgcggtgatacacgcctataatcccagcactttgggaggccaaggcgggcggatcacaaggtcaagagatccaagaccatcctggccaacatggtaaaaccccatctctactaaaaatacaaaaattagctgggcatggcgcgcacctgtagtcccagctacttgggcggctgaagcaggagaatcgcttgaacctgggaggtggaggttgcagcgagccgagattgtgccactgcactccagcctggcgacaaagcgagactccgtctcaaaaaaataaaaaagaaatcagaaactgttcaaattccaatctatacaagtgaaacctacacagttaaatgtcttaatagagagctaaaagcattaagttctgtcatactcaacatactgatgaaaaaaatttgaactaaaagacagcctgatctttagaaactggcagaaaaaataggggctgcatccaagaccactcacggcacgtccattcttccagcagctcccaactgctattttatgaaaagtccaaatttcccaccccaaggtcctagagtacagccagctccctaccatcaaaaacaatagctaccaaaactcagtaaaattaggcttgttatgaagagaagattgaagaaataaaggtatttatttcatcttggtatttgaatgtggaaactcccagtagggtaagaaaaaagaattctgccagagaaatgatgaagtgaaacctcaaacaatttgggcttttgagtgcctactgtcatccagccacgaaatgaagcattttacataagtaatttaagcccagtgatgcaggcagtaagtattatctccattttaagatgaggaaattgagacagacgagattacctaactctctcaaggtttcaccacagagctgtggttcaaacccatgtgttctagttttattacagttaagaaactgcaagagtttgccaatttgtcaagtgccagtccaagataaatggacactctgagtatcaaaaaaatacataatctgcagatcaaaacacgaagatacaaacatctaagagtcaccatggaagttgcggggcatccagtggtttttctgaaaatccatgaaggaaaagaataaagcatttttccagcctttcttctacaaactatatttcagggaaaccaaatatttgatgagggaattctttgtttagaaggattttagctaataaatgcagaggaataacaagatttaggaggggggagaaatcaccattttgtgacttctaataaaataatgggtctaggcaacagttttcaatggatgctaaaacgattaggtgaaaagttgatggagaattttaattcaggggaattaggctgataccatctgaaaccatttggcatcattaaaaatgtgacaacctggtggctgccagggaggaaggggagagggtgggggaagaacagaagttatagtttatgggcacaaagttttggttttacaagatgaaaatagttacagaaatgaatggtggtgatggttgcagaatattatgactgactatacacttaaaaatgtttaagatagagctgggtgcagtgttgcacacctgtagtcccagttatgcaggaggctgaggtaggagaaccacttgagcccatgagttcgagaccagtctgagtaacatatagagacctcatctcacaaaaacatcactaccacaaaacaaaacaaaacaaattgttaagatgctaaattttaagttatgtgtattttaccacaataaaaaaaaatgaggccgggtgcagtggctcatgcctgtaatcccagcaccttgggaggccgaggcgggtggaccacaaggtcaggagttcgagactggcctggtcaatatggtgaaaccctgtctctactaaaaatacaaaaaaactagccggacgtggtggctcacgcctatagtcccagctactcgggaggctaaggcaggagaatcacttgaacccaggaggctggggttgcagtgagccgagactgcaccactgcactccagcctggccaatagagggagactccgtctcaaaaaaaaaaaaaaaaagaaaagaaaacatagttacccagcaattccacttctaggcatatacccaaagaactcaaagcagggactcaaacagatacttggacatgaatcttcatagcaacactattcataatagacaaaaagcagaagcaactcaagagtccatcgatagatgaatggataaacaaaatgtggtatatccataaaatagaatatcattcagccataaaaggaattaagttctgatacatactacagcatagatgaaccttgaaaacattgtactaagtgaaagaggccaggcagctaaacttccaaagactaatatacaattccactgaataggcaaattcatagacagaggatagaataaaggctaatgaggggtgggggagaagagaatgggcagttattgctaatggatacaaagtttctgttggggatgatgaaaaaattgtggaactggacagtggtgatggttgtaaaacacggtgaatgtacttaatgccactgaattgtacacttaaaaataaacttgtaaattttatattatatatactttgccacaataaaaatttttttaaaaatgtctaagtgtgacaaccgaacttctgtgttaggataggaagaatacttatgaagtattcttgcccctgaaatgaaccaaaatctaatcaagtctctagaataaacaaccagttcacaggaaatccacagatagccaagcaagttagatggcaccataataaagtaatcaaccaaatccagaatgtggaataagcagttaaaaaaaaaaaaaaagggggggggaggccaggcgaggtggctcacactatggtctcagcactttgggaggccaaggtgggcagatgcttgagcccaggagtttgagaccagattgggcaacatggtgaaaatccatctctataaaaagtacaaaaaaatttgctaggtgtgatggtatgcacctgtggtcccagctacctgggaggctgaagtcagacaatcgcttgactccaggaggcagaggttacagtgagccaagattgtgccactgcacgagaccctgtctccaaaaaaaaaaaggaaaaaaaaaggcatagagaaagaacaactgctgtagaataaaagactaaagaggcaaaacaacaaaatgcactgtgcgaactctgatccagatgcaaacaaagcagatgtagaaaagatgtagaaaggatactttttttttctcttttttttttttttttgagatggagtctcgccctgtcgcccaggctggggtgcaatggcgcaatctcggctcactgcaacctccgcctcctgggttcaagagaatctcctgtctcagcctcccgagtagctgggattacaggcatgcaccaccaagcctggctaattttttttgcatatttttagtagagacagggtttcaccatgttggccaggctggtctccaactcctgacctcaggtaatccaccaggcttggcttcccaaagtgctgggattacaggtgtaagccaccacactcagccaggatacatttgatacaactggagaaattagaataaggactaggtgctagatattaaagaattattattaattttggagatgttataatagcatgaagattttatatatatatatatgccttatcagttggaaatgaacactaaaggacatatgaataaaaggcatcatgtctgggatgggcaaaatgcttataactgttgaggcttggtgatgggtacatgggggttcgttatgttatcctctctgtctttgtatttgttttagattttccactaaaaaagttaaaaaaataaatgcactactttgagaaaaaacattctaaaatctatagcctggaaaagataactgcaaatagagttaattgccaaaggtaacagctaaaacaatgatataaaatataaagggacagtcgacttgggtatttcatctggaaagactgacgaatatgtaagtctttactatcaagtacatgcaggagaatcttcaaaacaaacagactccaaataaattctaaaatgagaaatttgtagattccatatggttaatattttacatgaaaatcggggtgtaaaaactatagtcagccctctgtatccacagattcaacccaccttgaaccaaaaatattaaaaagtaataacgcaggccggacacggtggctcacgcctataatcccagaactttgggaggccgaggcgggtggatcacctgaggtcgggagttcgagaccagcctgaccaacatggagaaaccccgtctctactaaaaatacaaaattagccgggcgtggtggtgcatgcctgtaatcccagctactcaggaggctgaggcaggagaaccacttgaacccgggaggcggaggttgtggttagccgagatcgcgccattgcactccagcctaggcaacaagagtgaaactccgtctcaaaaaataaataaataagtaaataaataaaaataataacgcaacagtaaaaaaaaaaaatacaaataatacagtctaactatatagcatttacatgctagtagacataagaagtaatctagtagtgatttaaagtagacaggggggctgggcacagtggctcacgcctataagcccagcactttgggaggccaaggtgagcgaatcacctgagatcagaagttcgagaccagcctgaccaacatggtgaaaccccatctctactaaaaatacaaaaattggccaggcgtggtggtgcatgcctgtaaccccagctacttgggaggctgaggcagaagaaccacttgaacctgggaggcggaggttgcagggaggcaagatcacaccactgcactccagcctgggcaacagggcaagactctgtctcacaaaagaaacctccccagtaagtataaagagaccctaagagaggaaatggctgacagtgtaaatagagcagagcaccagaaggtatcacttcaagcatccgtctttagagacatttcacagaaacagtatcgaggctacaaaccgaataatctttaccttttgtgttctggaaaaaatgctgccacagaggtctgattttgaagtggctgccaacatcccagacagcgaaggtgttatttttatattctactgtctccacacagaaacctaaatgaaacatggggaaaacatttaattatgatttgtgctggttgaacaattcaaaataatttcaacatgcggacagtacttttaatttacaaagcagcctgctagtcaaagatctatagccttcaaagagaatgtgctggccccctcgcccattcatcaggacaggtgtctcaaaccttctctactctccaatctctagccacgcacctgccctttctctcagcaggagactatcacagtgtacttcagagcagagaagccgccgatgggaatgacttccacttccaccatacagtgtaaaagccagtctacatctttacccatgcttttcttcctccctcttggaacaacagaagaaggtaactctcttccaccaactccctccctctatgagccagatccaccctacccagactgtctggaactttttactattcctattctctcccatatctgaatatctccaatctgttcaccttggcatgcttaagccttttacatctttaaaaacaacaaaacaaacctttccttgatccccacatcttcatcgcactctcttccttcacatcttcaccctctatttgctttttttttttttaagagacagggccttgctgtgttggccaggctggagcacagaggtacaatcatagctcactgcagcctcaaactcctgtgctcaagggatcctcctgcttcagcctcccaagcagctagaactataagcatgagccaccatacctagctaaatttaaaaaattttttgtagacacagggtctcactatgttgctcagattggtctaaaactcctgaggtcaagcaacctgtccactaagctttcttcggtcctctcacgcaacagcaccttagctctgctccaccattgggtagctggttttcagtaaggtcagcagtgatcaccaggtcaataaatctaacacaggccttctcagttcttccataatttgatcttctatctgacgctactgctcactccctccttgacacccttccccagcttcccttttccttctatctctatggctgtactgtctcagtctccttagtgaactcagccacgtttaactgatcctgcaatgatgggagtcgccctggctctcactggccccatccactctcctctttctgcacccctccctaggcaatctcactcactcccacgacttcattcctatctctgtactaactctgagatttatatcccccaacctagccctctctcctgagcttcaggctcataatctaacagctttggcaaatgtcttcaaggccccaaaacaaggtgatcagtcaaaaatggaatttaaggtccctacccccaacctcctcctctgctagttatcccatcattgacttcgttccacaagctgatagcctgagaggtgccctggaaacatccgatgctcgcacccctagaaccctactaccacaccttatcaattcaaccccttcaacaactaatagtcaccctaacccaacagaccatcatttctagcctcaattcctgaaaccatataactaatttcacctcagccactctccctctctccatccggtcaccatcttctaaacaaagcaatagcttaaaaacacatagtgtggtcacgtcatttctctacacatttatgtttgattggaatattttcaaacttaaaaaagaaagaataatcgccccaaaaaataaaattaaaaattaaaaaaaaaagaaagaataagccgagcacagtagctcacacctgtaaccccagcactttgggaggctgaggtgggcagattgctttgagctcaggagtttgagaccagcctgggcaacatggtgaaaccctgtctctacaaaaaaacacaaagattagccaggcattggtgccgtgtgcctatagtcccagctacttgggaggctgagacaggagaactgcttgaagcaaacattgcagtgagctgagatcacaccaccgcaccccagcctggatgacagaataacatccaagaaagaaaagaaagaaaagaggaagagagagacagagagagagagacagagatgggaggggaggggaggggaggaaggaaaggacagaaaagggagggagggagggagggagggagggagggaggaagggaggaagggaggaagggaggaagggaggaaaggaaaagaaggaaagatgtccccttagcggcttcccacacccaaatcccaaacatgactgtcaagacccaagcaagctgggtctgctcaccttccaaacctcaattctagtcatgccttattttagtgagagacactcgttacattgcaacaatctaaattcttgctaaataaataaatacaatgccattccaatcctataatgatggtaggggcaggggcaggaaacttagcaaaattatctaaaatttaacctggagaaataaacaagtaagcataaccaggaaatctctgaaaatgagtaatgaattatttttaaggatatgccaagccctagtaacacttgaatagagttcaaatataaatgcaacaggtacttgcccaaaaaaagacacacataccagtgagaatttagtatgtaacaaagaaggcatttcaaatcagcatggaaaaattattcaataaatgacattgaacaactgtctaccccagcaccgtccaatacatagtcactagccatttgtgactatttgtttatgtttttgttttattttgttttgtttttgagacagagtctcgctcttgtcacccaggctggagtgtatggtgcgatctcggctcactgaaacctccgcctcccggattcaagtgattctgctgcctcagcctcccaagtagctgggattacaggcgcctgccaccacgcccattttgcaattttagtagagacggggtttcaccatgttggccaggctggtctcgaactcctgacctcaggtaacccgcctgcctcagcctcccaaagtgctgagattacaggcgtgagccaccatgcccggcctatttatttattttttgagacacagtcttgctctgtaacctaggttgaagtgcaatggtgcaatatcagctcactgcaacctgtgcctcccgggctgaagtgattctcctgccttaacctcccgagtagctgggattacaggtgcatgccactactaatttttgtatttttagtagatatggggtttcaccacgttggccacgctgatctcgaactcctggtctcaagtgatcttcccacctcaacctcccaaagtgctgggattataggcataagccactgcgcctggcaacgtggctatttaaacttaaagttaaaatcaaaaatcaatcaataaataaaaataaataaaaaataaacttaaagttaaatacaattaaaagttcagttcccggctggacacagtggctcatgcctgtaatcccaacactctggggggccaaggtggacggatcacccgaggtcaggagttcgagaccagcctggccaacagggtaaaactccgtctccactaataatacaaaaattagccgggtgtggtggcgtgcacctctaatcccagcttctcaggatgctgaggcagaagaatgacttgaacccagggggcggatgttgcagtgatctgagatcgcgccactgcactccagcctgggtgacagagcaagattccatctcaaaaaacaaaaaagttcagttcctcagttgcattagccacatttcaagcacatgaacagtcacatggctattggctacgacactaaacagcacagacacagaacattttaatcactgcagaaagtgcctcctgggcagcactggcttatccatttgaaaaatttaaccaaattactaccttacacacaaccatctcataactcgaacattctcctcggtttcccactcctcaatcgatgcaatctctgcagctactgcccaagttgaaagttgatcatttggagaccaggtgcggtggctcacgcctgtaatcccagcacttagccgggcagatcatttgaggtcaggagttccagaccagcctgcccaacatggtgaaaccctgtctctaccacaaatacaaaaattagccttgcatggtggtgaacgtctgtaattccacctactcaggaggctgaggcatgagaatcgcctgaacccaggaggcggaggttgtagtgagccgagatcgcgccactgtacttcagcctggggtgacagagcgagactctatctcaaaaaaaaaaaaaaaagaaagttgatcatttgagtcctgtgcctaattcaatattcagaacagaacagtagtaatgttcacatgccacctgtggggtgtatcctcagtcagaagtttggatctagaggcagttcacaaggcaaagattcagttctgtcaaaactcgctttgtaaatctcttaacaagcccgtaaaacacagtgctggttcacagtaagagcagtgcagccagcttgtctatttctctagttggacatcatctcaagcagctggtttgagccagagtgaagaaaaatcacactccatctctaagcactgggagcgtacttggtgtagagatgagatgctgccactaaggaaggccagctggaacagaggctgactgaggaggcaccagcagattcccagctcccacctcagccttctgctgggacactagctgcgaggaatgaggggcagaactaccctccctgttttgcccattatctttttcttttttgccaagcaaatggggttaaatttgcttagcctccatgtgttcacatgtctcccttgtgaacctaagaatgtgcaagccactagaaaaggatacataacctggccaggcgcggaggctcatgcctgtaatcccagcactttgggaaaccatggcgggaggatcgcttgagcccaggagttcaagaccagcctaggcaacatggcaaaaccccgtctctactaaaaatacaaaaattagctgggcatgctggtgcacgcctgtagttccagctactcaggagggagatggaaggatcacttgagcccaggaagttgagactgcagtgagcagagatgtaccactgcactccagcctgggtgacagagtcaaaaaaaaaagaaaaggatatatataacctggtttttggcctctaaaaatgtatgctcatggagtagacaagatttttaaaaagaattattcaataacataagaagcatgtaaaaataaaacatatttctctggtgaaacagaacctaaaaaatatatataacatactaaattgtaaactggaattgccacaggtctttcattaacttacctactgtagggacggcaggcacagtctcccccagcttcaatttatacaagatggtggtttttccagctgtatccaaactcaatataagaatccgcatcttttttttcccaagtagacttttaaagagcttttcaaaaatgtttcccattgtaatttaatcgaattctgtaacatgacaagaaaagcaagccaaataattgttctctgcagagatatagaagcaacacgcagaaaatacaagtgtcaattagaaatggctcccaggaaaaattcaacaattttaggtacactttggccaatgagtagtgagtcttgtcttcaaagggaaactcaactaaacctttccatgccttaccagaaaattctattttccactgcagcatccaagagggatatgcaacatagcctcagcactgctatgacagtggcagcctttagtcatttagtacagaagtacaaggccaggtgcggtagctcacgcctgtaatcccagcactttgggaggccaaggtgggtggatcacctgaggtcatgggttcaagaccagcctggccaacatggtgaaaccccgtctctactaaaaacacaaaaattagctgggcacggtggtgcacgcctgtagtaccagctactcaggatgctaaggcataggaatcacttgaacctggggaggcagaggttgcagtaagccaggaccacgccactgcactctagtctgggcaacagagcaagactgtctcaaaaaattaattaattaattaattttttttaaaaaacaagtacagaagcaatgatacaacaaatacaactatacctcattctaaactctactgaaatgagaatttatgaaacagagaagctttttattttatgcaatataaaacaaagtctttaagacaggttaaacaacaatatcccttggaaacgtagtagttccttatggctagcagacaccttggaaataacctaagaaatttcagaggcaaagaaattcagcgttgggaagcttcactgccaagagagataacttggcagagttgaggaggcaccacagcatccagttttcgtttgagttttttgttttgttttgagacagggtctcgctctgtcacccaggctggagtgcagtggcacaatcacggctcactgcaacctcaacctccccatctcaaacaatcctcccacctcagcctctggagcagctgcgaccacaggcatacgccacctcgctcagctaatttttgtattttttgtggaaatgaggtctcactatatttcccaggctaatctcgaacccctgggctcaagtgatcttcccacctcagcctcccaaagtgctgggattacaggcgtgagctaccaggcccagccagtatccagtgttctattgctgtaactatcaccttactctcaaccagttcttagaactttttatttaagtataatttacatacagatataaacatacatgataactgtaaagttcaatacattttcatgaaccaaacacacctatgtaaccaaatcaagaaaagatgatttatcaggctgggcacagtggctcatgcctgtaatcccaacactttgggagaccaaggtgggtggatcacctgaggtcaagagttcgagaccagcctggccaaaatggtgaaaccccgtctctactaaaaatacaaaaattagctaggtgtagtggcacacacatgcagtcccagctactcagaaggctaaggcacaagaatcacttgaacctgggaggtggaggttgaagtgagccaagattgggccactgaactccagcccagggcaacagagtgagactccatctcaaaaaaaaaaaaaaaaaaaaatgattatcagaccaattctccttgtgcctcctcccagtcattactccataaaaggtaatcactatattgacttctaacagcataaatgttcaatattttatttttcagtagaaatcatggtaggttatataaagtaagtcaatagtaaagtcagactaacttacagaaatttacagtctctttgagatcagcctacttgaaatgtgagcttgacattctaagtaaagacttacaagcagtgctgggtctacacctctaactaagctcttggaagtctgtaaagatcttcagaccaggcagggtggcttacccctgtaattccagcactttgggaggctgaggcaagagggtcactttagtttttgcttactgagataacagaagacaagggaggattgctttaggccaggagtacaagaccagcctgggcaacatagcgagaccctgcctctatttttaaaaataataaaacaaaaaaaaattcaaaaagaaaaagacatacatccttgttccagagactgtgatttattttctttttaaattgctaaccaaagaaagctttactcctgggcaggggaggaggaagacacaaggaggatagccaatctcccattcattcggactctggtaaccacagagcggaggtaaccaaattccacaggcctcaccgctgaaattcaacagtggccagcagtagcttaatatcatggattacgcccaagtacacaacattcctttctaggatgagagaaagcgagcacagaatttatcctgttcacaaatgtggcgtaagtgaccaaagaatgataaatgttttaatcattcaaagaaagtccattataggtctataaaagtccagtgcattgcagcactcaaaatcttgccgggcgacaaaactagagattccttttctttgtttcgaaaaacaaatctcacagatgaggagacttttcaggaacatgctgggggagggaaggtacttcccgctcagatgccccttgaggcagctagtcccaattccccctgccaaccgcacagacacaccaccttgacctccctctcccttctctttcctcttattgctactcatgtgccccaggcgcccgtggtcctgacacccctgcgccgctggagacccctctaaggtaagatggctccgactacagggcctttttggcacgctcagtctcccagccccaagcgccaaaagtgcattagggagaaacgtcggcacgacgtcaagggcgcgaacaagcgtggtggcccaggtgagcgtgcgcggcagccaggcacgcccggctcccggggaaagacgccccttttttgccccggctgccaggccgctccttctcaacttgtgcgcccctggaagagcaaagagagggccctgcgtggaacctatgaagcctccttcggttcctcgctgctccggccctagagagggcgaagaaggaacagcggagcccaatccctttccgaaagccaccgccgccctccagtttctggcccgcagacgaagtggagatccagccaggtcttgagtgctgccgccccatccctgcagccggagactcacctgttgccactcaaggtaccgctacctacaacaccgccgactccgcggcctttaggatttcagctcagttcagctaaaccacgacaggcgtgggggcaggaacagcaaccaaccaatcacccaccgcctcctggagcttttgcaccaatgagctcgaagttttgtgagtgacgacatatctggccaatgcaaagaagagtaagggcctgggagggagggagcgccgtaggcgacgccatgaagctctggcaataccatgttcatcttcaaatcacagttaaacgaattctggcgagacacgcccacgtcccccacccccgatgccatgtgcgaccaatcagaaaagcaaaaggattgtctatttgcacggccaatcagctgggaaaatcgccgaggtttgagctaacctcggagcgtccacaccaaccgggaggggacatgtgggccgggccaagttaatagtgccatggaaggaaatttaccgcggttgagttaaacgtagacattagtttggggcggtgttccgcgtaggaaataccacacactgacactgaaattaggcataaggaagttttcctattccgcctgaggctagactgccctcccacctctacacagattttcaagttggggaaaatactggccacccgcacctcgttaagacgtcgcagaaccagtcctcgtttccgagaaatgctttctatagtcagttccctaaatgcccaacttgttagctaaagaggttacaaacgcctgtaaatggtacataactgaaatcatcagaacaacaaacatctattaaacatatactatgtgccagaaactatatcaagaacttcagcaggcccggcgcggtagctcacgcctggaaggccaaggctttgagctaggagttcgagaccagcctgagcaacatggcaaaaccccatctctgcaaaaaaaaacaaatttaaaattagccgggcatggtagcggctgtagtcccagctactcgggaggctgaggcaggaggatcacttgagcccaggaggtagaggctgcagagagccgtgatcacgccactgcactccagcctgggtgacaaagcgagaccctgtctcaaaaaacacgaacaaaaaaagttagaagatactgctagaattgactaaataaataaataaataaataagaaaaacaatgttacctgcaggaccgtaacgcccagtgaattacaaactattatccctggccagacgtggtggctcacacctgtaattccagcacactgggaggccgaggcgagcagatcacctgaggttgggagttcgagaccagcctgaccaacatggagaaaccccatctctactaaaaatataaaattagccgggcgtggtggcacacgcctgtaatcccagctacttgggaggctgagacaggagaattgcctgaacctgagaggcagaggttgcagtgagccaacatcgtgccactgcactccagcctagacgataaagcaagaccctgtctcaaaaaaaaagaaagaaaagaaactattatccctgctgttttacagaaaaatattaagtagcctgggtctgtcccactcccacaccttaatctttttctttctttttccttttttttttttttttgagacagggtctcactgtcgcccaggctggagtgcagtggtgcgatctcggctcgctgcaacctttgcttcccaggttcaagtgatcctcctgcctcagcctcacaagtagctggcattacaggcatgtgccactgcgcctgcctaatttttgtatttttagtagagacagggtttcaccatgttggccaggctggtcttgaactcctggcttcaagtgatccacccacctcagcctcgcaaagtgctgggattacaggcatgagccaccgcgcctggccaccttaatctttttaagcaaatacagaatggaaactgccctcacaggattaaggagagttacaagccaggctttaggcagcattatatatagttagctgttatccagggtgcacaagtgtactttgacccacttccctgcagctgctaactcactgaacatcactccacgtgctagaccacctcctacctgtttctccatggttcttaccatgagtaagaatttctgacgctagactcataagatcgttttgcccaagaacgggttgtttttcagatcctgaattctgacgtccccaaccaaggaacccactcagcacaagaatgaggtttcttggtctccctgtctcatgacttcgcccttcacttcttgaccaatcatcgatccccacactgcagcccctgtccagaggacttaaaaaccctgccccccaaacctctcagggaggtggatttgaggcttcttcccatctcctcattcagatgccctgtgattattaaactctttctttgctgcagccaggtgtctctgtatgctgactcactgtgcattgagcaaacaaaactattaaattacagtactacttactcttctaattacagtgcttatatgtatgagggttaatataaatacatatgactccttaaaaattaaagtatgttttttctgactataaaaattatacataaccgggtgcagtggctcacacctgtaatcccagcactttgggaggccgaggcgggcagatcatgaggttagatcaagaccatcatggccaacatgctgaaaccccgtctctactaaaaatacaaaaattagctgggcgtggtggtgcattcctgtaatcccagctacttgggaggctgaggcaggagaattgcttgaacccgggaggcggaggttgcagtgagccgagatagagccactgcactgggtgcagagcctgggtgacagagtgagactctgtctcaaacaacaacaacaacaacaaaaaactcatgctagtttaattttcatttatttgatgacttgctatttttccaaatgtttactagtatttttatttcatctattagaaatgatatattcatgtcctactgacttccaagggaaagatagaaagttgttttgccaggaactatgaaggttgtttgaatggagtcatcataacctaaaaaaaaggtgaaataacgaaggtgagatttttacttaccattgtttgttcctacagaaggaatgctggagctgataattatgagaatttatccttccatccctcatagcctaagaatattcattattttcccaatatctgcactgagcctgtaaaccaaaatgtatctgagacatgtctcaatcaatttacaagtttattttgccaaaattaaggatgcttacctgggagacaggcctgtgcctttttccaaaggtgattttgagggatttagtttggtttgtttgtttgtttttgagccagagtctcactctgttgcccagggtggagtgcagtggtacaatcttggctcgctgcaacctccacctcccaggttcaaatgattctcatgcctcagcctcccaagtagctgggattaacaggcgcgtgccaccacttctggctaatttttgtgtttttagtagagacggggtttcaccatgttagctaggttggtctccaactcctgacctcaggtgatccgcccacctcagcctcccaaagtgctgagattacaggtgtgagtcaccgcgcccggccagaaggatttaatattttatttatttatttatttatttatttatttttatttttgagacagagtcttgctctgtcacccaggctggagtgcggtggcacaatctcggctcactgcaacctccgcctcctgggttcaagccattctcctggctcagccgccccagtagctgggattacaggcgcacaccaccatgcccagctaatttttgttgtttttagtagagacggggtttcaccatgttggccaggctcgtctcgaactcctgaccttatgatccacctgccttggcctcccaaagtgctgggattacaggcgtgagccacggtgcccagcaaggatttaatatttaaaatggaaaagcaggctggaagggaaagaaggagagtatggtcacattactgaattcacatgttgcaagagacaaggagcaagtaggggaatagtcaattatgtattactctcgtgcttaccataagataaggtggacatagagtagttagctgcagtcagtcctgcttaggaatgaaaggaaaggcaacttcttgcatgactcagctttcagcttaattttttttcttttggcagaatgaattgggttcccaagtttttattttcctttcacaagcctctgaataaacaaagttcctgcccacatggcattcaattgctaaacaattataatcacataaatacatacacatatacgtatatgttttatatatatatatatatataatatatatttaatacatacgtccgggtgcagtggctcacacctgtaatcctagcactttgggaggctgagttgggtagactgcttgagccaaggagttcaagcccagcctggtcaacatggtgagaccccatctctacaaaaaatacaaaatacaaaaattagctggtcatggtggtgtgcacctgtagccccagctactcagaagactgagatgagaggactgcttgagcctggaaggcagaggttgcagtgagccaagatagtgccactgcactccagcctaggagacaaagtgagactctgtctcaaaaaacaaacaaacaaaatacattcatatagagagagaaaaagagggagaattttataatgatatgcatgaggaatgtataggggaagaggctaaaaataggccgaacttactagtgaatatattcaggaggtaggactgtgattgtttttaagtgatcgagggaaaatagtgtactgattttaaaatggaaaactcaacttattttttaaaaattaaaactctgacaagagggaggtttaattgaaatcacagtggctgctcagggaagtttataaatctcgaactgcaacgactcaataagcatgaattgcttgtgatgatattgacttaatagagttattttttccttaatagaaaacacatcttatcaatataatgttatttgtaaagcatggaaaggacaaagtgctcttgggagaagtagaaagagaatttcactctgagaaacctatttggagaaagctcctcatctctggcttagactttaaaattagttaatagtgtaattagggatagttgtagtaatagtggtattggtatggtagttagagtttaaatgtcacacagaatacccagaccaccttcccccaagtgccactaaacttattcttctaatcaaacctctgctcaagggatgtcttcttcctctcttggaaagctgtgttccttacctcagaaacagccctccataaacctgcccttaagagaatccttggccaggcacagtgattcacgcttgtaatcccagcactttgggaggccaaggcgggtggatctcttgaggtcaggagttcgagagctgtctggccatcatggtgaaaccctgtctctaccaaaaaataaacattaaaaataaaaaaattagccaggtatggtggtgcgtgcctgtaaatctcaactacttgagaggctgaagcagaattgcttgaacctgggaggcagaggttgcagtgagctgagatcgttccactgcactccagcctgggcaacagagcaagactccatctcgaaaaaaaaaaaaaagagagagagagagaatccttaagacacgccttcttggatgccctctggagaaatgtcaagagtagccaatatagtcaccccagtcggctgtggtgtgtgggcctctagtgttttaaggttctaggcaacttagcccctcccaggagatgctgatttacttttctcaaggtgcataaagtctcatcacaccaatatctgaaaaatctcttttcaaagagatgcaggcagccttccagccccatgatgttaatacacagggttaggcagcctggcaagtgcactggggcccccactgaaggatcatctggtttccatagcaacagtccttcctttccacggaggattctatcatctctcctgctcactcaggctttccagaatgaattgttttttgtgactataggtgtttgtccttgatcctgcaaagagaaaagacatattcatttaaaacaaacaccccccaccccgccccgcaactgactgcagctagaatactgcattgcatcagctggtcttcctttcatttaaaaattccatgtcctttctccattttgctccgttctctagctttatccatcattttagaaaacaggtttctctgacagaaaacaaacagatggcaactccatcatcctaaaactggctgtgacggggctctaaaattaagtgttcatggggctcccagaaagcctaggcttgcatggtatgtgtggctgacctgtgagttacgattggaggggcaagagaaggctttctatacacagatggctccccatacagtgtcacagtctctgaagtgttgccttttgaggtttgttttcttaggtcaggcactgctgtcctgtcagtattttcctaaattgccaatactcctgggaagagtaatacgttaggttactaatactgaaagaacttgggaaagagaggagggggtgcagcgggaagggaataaaaggggctctgaagaccacctttgtgtgcttcacagtgacatcttctgcaagaggggaagtgcaggtcttcatctctctctttgtctctctctgtcacacacacacacacacacacacacacacacacacactgcaggacgccttctgacaattacaatacagtagtgaattcaccgaacaggactgttccctgaaacacctacatacaatcccgctggaagacctttgaaacagccctgcagtgactaaaaactctgtccccagtgccacttgtttaaccctacagtttccacagactaaaggtagttttcctttggttaatatgaaaacaccaaatagtcagattgctttgttaaataaagtggattacggtgaatctgttcacttctatgttttatattgccctcactccacaaatcacagaagatatttatttttcccccagttaaattctgttaccacaaccattacaaacaaatgtctatataaccaaaatgttagtcagccccattccaatggagcacattttaagtgatgtttaatgggacataatttgaacataaaattctatctgtgcactgttttcaagtctttgaatcaggcctccacctatagatgttggttacctatcagggagcaacaggtgatgctaaggatcactttgtaaaaaccaggaatcacatccctgtaactgacaggaaactgactatattcatcagggttctccagaaaaatagaactaacagaatgtgtatatacataggaggaaattttgtttaaggaattgactcgtgtgatcgtggagactttgggagcccaaaatctgatgggagaagctggcatgcaggaggcccagggaagagttacagttctagtccacaggtaacctgctagagaattccttcttgttctggatgagtttggccttttgtctattcaggctttcaagtgattggatgaggcccacctacattatggagggcaaccttctttactcaaagtctacagatttaaatgtaaatctcatccaaaaacaccctcacagaaacatccagaataatatttgatcaagtatctgggcaacatggccaagccaagttgacacagaattaaccgtcacactggatcacaagggctgtgttcagcaagaactgaccttggtcaaaccctgcccctgcccttatgccccactcttcttcattctgggtcctgctatttccattttatcatgtcttcatcttctttccccacctttcaggtacctttcctctctgaccctatccctagactcacctcctaccccccactcaaagcccttccttccttaaaaaatgatgttagtcattacactttaggatttaaattaatcattctgttagccgtcttactaactttctcactgtgaaaggaaagcatattaaaagaatttcagggatcgacgaagagctgagggaggtatttttctaggaagagaaagtgactaacagaaatcaagacaaagggggacaatcagatttttcagatgacagaaagcaggtaaactctagagatctagagaactagcaaatggtctcttcagggtgtcatcattgcagtaaatgagctctagctatttctgtctttattcttcagggtattcaagattgcagttacttaggagagacagagcatctgactgattgaacttgggttctgtattcactcctgggccagggggaggcagggtacctggtctgacagtccttccaaggctgcatgaaccagaggagctgttaccagaaaagggcagagtgaatttggggcagcaaaaacatttattgcttatcgactatcactgcaaggattactcagagggtgatgcagaatcagcacccctctatttctaagatgaccttgaatgtcagagcaaggcacaaacaggttgcagagacatgtggagtatctggagcactgtctcaggatccttcctctcctgctggatgctaaggaccttaaggacaagagctatctttgcttgcaatttatttggcaggccctgcagggctgtgcaaatgattctatttaatttttactacttgtgagaaggcacagagggctttgagagggcacagagggcctcttataatgggtagatatgcacattagctgatacactggaaactttccagcaggcatatccttccaagatgataaatattcttccttgttggagaaattgaagacatttgtacttgcaatctagcttatctagtaaaacaagacaaactaaccagtgatagggagaaacatgtttgcattattttccaaccttgaaaataatgtcagattattggactgagaaccaatgtcatcttctggatcttgtaattatttggacaaaatctctttgattctaggttcaaagtcaaggtgtcaaaaaaaaaaaaaggatacaactgttaagcttatttaattatacctctcactgtacaaataaggaaactaggccaggcgtggtggctcacttctgtaatcccagcactttgggaggacaaggccagtggatcacctgaggtcaagagttcgagaccagcctggacaacatggcaaaacgctgtctctactaaaaatacaaaaattagctgggtgtggtggcaggcgcctgtaataccagcgacttgggaggctgagacaggagaatagctagaacccgggaggcggaggttgcagtgagccgagatcatgccactgtgctccagcctgggtgacagagtaagactgcgtctcaaaaacaaacaaacaaaaacaaataaggaaactgggctcagagagatgaaggtacacaggtgatgggtagatagggacaaagaaaagaacctaaccctttggactccccaagccattctaatatttgtttttgtaagttagtagcttctgcacgttagtatgtcagaactcaactagtttcctatctttcctgataacctctccgacccacccatgatttagctaacatctgatttggtcaaccaagcaccctggtcctcaggttcagtgtgagacttaatgaaataggcgtgaattttttttttttttttttttttaaacggagtctcgctctgttgcccagcctcgcaatctcaactcacttcaacctctgcctccggggttcaagcgattctcccacctcagcctcctgagtagctgagatcacaggcgcccgccaccacgcccggctaatttttgtatttttagtagagacggggtttcactatattggccaggccggtctggaactcctgaccttaggtgatccacccaaagtgcttggattacaggcatgagccaccgcgcctggctggcatgaattttttcttctgtccctagttcatcttcaggtcactgtctgattttattagttctcaaatttaaatcactatgcatgctcagctcttctagttatttcccttctttcctcatgttgggaaaaaaaccccgatttattctaattgtgagaaatgaaagcgaacaaatcctatcattccctattgtcttgtgcaaatatgaagagagatatgatagtggggtaaataaaagcatcagggaatccattcggcagaatctttctcctctcagcgtgcttgcagttagatattctgagattccagtggagaaatggtatggtggaaacattgaggttcaacaaggctcaatttagggcatattttattcagattctaccatatatattgtctaaaatgaaacaacactggggaatgaaaaggttggtcgaagatgcaagttgcctttattaaataaagacaaatatttaataaaaataatgtataaaaataatcacaattcactttcaaatctgaaaatactgagttttccaggctacacataaataaaactgccaacgatgacaattccagcaactaggaaaacaagtacgcctacaaagaaaagtgagaaaattcatggagaatttgaactcagaaccaactcctcggagctgatcttttttgggggaagccagggaacgcgccgggcgctctcatcagcaagaccatgtttaaagagagtgtggaagcacagaccaaaatggacattcgagggcgaacagcagctggcaaagggataagtgatccgaagcattaaagcccttgagacaaattccggcgcgaaccgccagtgggggatgagactcgcaggcgcagccctccaggccccggcggactgacacgcacgttggaaacggagtcacccaccacagccccgcagctccagccaaaatggcgccgccgctctgcccaccccgcgcaccccaggcggccgccgagcccgcgcgcgcgccctgtggagcgaggacgccggggacgcggccagggacgcgcgcgtcctcacggcggttgcacgcctgcgcgagggcgggcggcgggggcgcgcgcgcggcgggggcgggctttgccgagcgcagagctgcagccgccgagccggacgtgtccgcgaagatggcgggccgggtgagtgccggtctgggagcccaggcttgaggcaggggcgccgggctcgcgggcactctggggtccaggcggccccagaggagtgggagtgaatccgagcaatggggcgcgaggccagagcgggacttgagggtagcaggggagcggtggcaggggattagccctcctcaacaactccacccccctcgaggggagatgacccctcgttacacgcgtctgctgcgcctcccgtcatcctcccttcccatcccttggggcttgttccctcgtcctccacacagccgcagggtcgcggtcgccgaagccccctctgacgggctctgggggtctttccgcacccccttgcgagggcttattagggggcgccggagtaactgccgggagcacctctgctgcattcggggcaaggggtgtaggaaggatcttcaggaacccatgtctggctcttcacaaattaaaggtcgttgggaaagaggagggggtgccaatgacttttagtgttaaagcccggccatctgggggacctgtcaactgtcgggtcaggcaggaattggctttagcttggagtgaggatggatttggggtgtcacgttttgtttttatggatgacactcgcttcgaatgcagcaggatatgctgtagtttcagggttttaaatttacttcctcctttagcctttaggatcgttgggtaggatgggtttggcgaggagagagagctggttgagtgctgtattgcagtctgccttgagctaaaagctctcaagggatgagtcctgcccggagattacactggtcataaacctgaggacattaactgcgtcattgggggtgaaagatgtgattgactgatctatttataacagaatttttgaataagtttgcatagatttatgcatatatgcaaatgccctatctgaagggacttgtaggtcatgagattctagagtaagaagggatcttaaaggtcatttagtttggcttctttctcttccttttccccatggcctctccttttaaggctagtccttctgccagtacttcagaccctatctgtatattcacctgctccttcttaacataatcaagcttctctatcttaaacccttcccccacccccacagctgtcaccttttcccgtcccagtttacagcaggaaatttgatagagttgtctatatttattgtcttccatttgcttaccacctactcacccttcaacctactgcagtctgatttctgccccatcatcccactgaaacctgtccctcaacttaattgatacctttcaatccttatcttatttgatatctcagcagcgtttgacgttgttgaccatggcttccttgacggaaagcactcttcacatgtgttctggaatgcctcgctcctggtttgactcagacctctcttttgcggcctcaccctcctctactttgttattcattgctggtattcctcaaaggccgtcttctcactctcaatttcccgctcaggcaatttcttctaagcccatagctacaactgtctatatgccagtgattctcaatattttacccccagtccagacctgccctttaagtttcaggttaatatgtccaactgcttatttaaaatcaaggtcccgaaacgcagctttttcaactccgaacccaggatcttagcccacctaacttgtgtagatactcctcgacttaacgatggggctaccttccgataaacccattgtaagctgaaagtatcagaagttgaaaatgcatttaatacacccgatctaccgaatatcatagcttagcctagcctgccttccttacacatgcacagaacacttacattagcctacagttgggcaaaatcatctaacataaacctatattataaaatgttgaatacctcatgtcatttattactgtgctgatagtgaaaaacagaatggttgtgtaggtcttcaaagtacagtttctgctgaatgcctatcacctttgcactattgtaaagttgaaaaatgttaagtcaaaccattgtaagtcagggaccatctgtacctatccagtgagataggaatatctcactgaatgataccatcatccacccagttatataggctgggaatctgagggagggagagggtgggtaaccctttatatctctcttttgctgtacccatgtcctctgccctatcccccggtaaaatttgtcagagttctgctcctgccccccataaaggtatttaattagggccaaagactctggtttgggggaatggttgctttagactagttccaagtcacccactggactatctggattggtcacatgggttctgtcattttaacctaaaaatctccagtctgtccacctttccacatcttcatttttacctccttttcccaaactaccatcatttctggtctggactactgcaggaagcttccaagtatttttttgttcgtttgtttgagatggagtttcgctcttgttacccaggctagagtgcaatggcgtgatccctgctcactgcaacttccgcctcctgggttcaagccattttcctgcctcagcctcctgagtaactgggattacaggcgcccaccaccacacccggctaatttttgtatttctagtagagacggggttttaccatgttggccaggctggtctcgaactcctgacctcaggtcatccacctgccttggcctcccaaagtgctgagattcgtgcccggcctcccaagtagtcttcttagagcatgtggcccacctccaattcattcttgaccttcattgttccttcccgtgcctattactacttaaacccctcctcagcagcatcccattacttttgggagaaaaccaaatccttaatgaggccttcaggactctttgtggttctgctcctgcttctttccactcattctcttactctgtgtgctcaggttatatggtaaacgagcctttcaattccttgaacctgtagtttctcttaccacaaggtctttgcgagtggtgtttcctttctttgtaacgttcttccccccaaccatttacctcctactcagacatcacttagctactcaagggaggcctactctgaccccacattataagtcaggatcctttgttatatactcttgaagaactgtattcctctccttagagatttatctttttgttactttgagtgtgtgttattatttgcttctaccacttcacctcagtgaaaagcagagaacatacaagttatttagtcattatcaactgcgctttgtgtaccttgtgggacttaggtactcaatacatttttgttgaaaatgaatcagtctctgaacactctggtgatagatggtatattaccctaaagcttgcctgtaatgtcatacagctatgttaggtctttgttatctggagttccatgtaacttttatacgtagttactatttctgctgtttcaagccatacggaactaaacacaattctttttccatgtaatagctactcaagctactcatttacttgaatacaggttacatatctcctcagattttcgattttgcaagttaaacatcccccaattcctagcatatttcatattccaaacccttcatcatttaggctaccttcctctggaagtaacctaatgttactgttttgtcaacctttcttctaaaatgtgcccagagtggaacacagtgatcagagaagaatgtacttaagctattattgtcttgagatggacactaccattattcataccagataaaattgtattagcgttttttctatagtaaatcacattcttggctcatactgagcttgtagtcagtgaaaactcatgttcttttaaaatcagctccctagctccattctaggtttagagcagttttattgaacctaaatcaagaccttatccttttacaattcatttttttaggtcagtgcatgtctgctgtttgttgaggtaatctggattcttagttctttcatgttaggaaacataatagctgtctcttccagtttggttagatctgtaggtttaatcatgacttctgtttctacgtttgagttattggtaaaggatagaataagacagggtcagaaataacccttggacatgctgccagtgacatgcctctagactgatacccattaatacacttgggcactgttgcttaaatacagatgtgtctcatttaattccaacaaaacaacctgcaaagtaggtagtattatctttgtttttttgcagagagaaagagagagagatttagtaacttgagaagttcacatagccagcaagaagcagggtcaagatttgaactcagatcagcctggtactgttacctagttcaccagcttagttgcaagagtgtagtaaagactaggtttacctcacctagaactttttggacataataatgttcagaaactatcttctaccttttggaaaatctgaaaaactttggcccatctgattgtctatcatttcttctgatagcctttattttctagtaactactgagtgatttttagcaaaaatagttcaccttgttgcaatacttttatttgtgcatatttatggagtacatgaaaatttttttacatgtgtataatgtgtagtgatcaagtcagggtacatgagtccaatgtattaagtatagtcatctactcagctatcaaacattgaatttattcctcctatcactggatcttttttttttttttttgagacggagtcttgctccgtcacccaggctggagtgcagtggtgttatcttggctcactgcaacctctgcctcccgggttcaagcgattctcccgcctcagcctcctgagtagctaggattacaggcatgtgccaccacgcccagctaatttttgtatttttagtagagacagggttttaccacattggtcaggatggtcttggactcctgacctggtgatccacccgccttggcctcccaaagtgctgagattacaagtatgagccaccgcgactgacctcattggatctttttaccttttaacccacttctcttcagcctttctctcccttactccgccttcccggtctctgttatctatttttccactccctgcctccttgtgttcaaattttgtagctcctacatatatgtgaaagcatgcaatatttgtctttttgtgcctggcttatttcacttaagagaataacctccagttccatccacattgctgcaaatgatatgatttcattctttttatggctgaatagtattccattgtgtacatgtatgacatcttctttatccattcatctgtagatggacacttaggtggttgattccatatttttgctattgtgatagtactgcaataaacatgcaagtgcagctatccctttgatacattgatttcttttcctttgtgtagatacccagtagtgggattgctggatggaaggtaattctatttttagctttgagaaatctccatacagtgttccttagtggttgtactagtttacattcccaccgacagtgtatgtgagagttcccttttctctgcatccttactaacatctgttactttttgtctttttaataatagccattctgactggggtaagatgatatctcattgtggttttgatgtgcatttctctgatagtggtgtggaacatttttccatgtcttcttttggccattgtatgtcttcttttttaatgggattatttgttattttccttttgagttgttcgagttccttgtatgttctggatatcagtcctctgcttgatgaatactttgcaaatattttctcccattcaacaggttgtctcttcattctgttgattattcttttgctgtgcagaagctttttagtttgcttaagtcccatttgtttagttttctttatgttacctgggcttttgatgtcttaatcataaattctttgcttacaccaatgtccaggagtgttttccctagactttcttgtagtatttttatagttttgggtcttaaaatcttcaatccattttgagttgatttttgtatatggtgagagataggggtctagtttcacacttctgcatgaagttatgcaattttcccagcatcatttattgaagacagtgtcctttccttagtgtgagttcttgtcagtgttgttgaagatcatttgtctataattatgtggttttatttctggattctctattctgttccattggtctacatgtctatttttataccaataccatgctgttttggttactatagctttataatatattttgaagtcagataatgtgatgtctgcagctttgttctttttgcccaggtttggtttggttgtttgggcttttttctttttccttttttggtcccatatgaatcacattggtattttgatagggatttcattgaatctgtagattgctttggcaatatggtcattttagtgatattaattctttccacaagcataggatgttttttgatttattttctttcattggtgttttgtagttttctttgtagagatctttcacctccttagttaaatgtattcctaggtttttgtttgttttcggtagctattgtaaatgggattgccttcttaatttctttcttggctagatccttattgatgtatagaaatgctactgatttaaaggttttctaaacctacagatatataatcagcaaagagacaatttgactttctcttgtccagtttggatgcctttcatttctttctcttgtctgattgttctggctaggatttccagtactgtggtgaataggagtggtgaaaatgggcatccctgcctcattccagcttttagaagaaagatctcacctctcctcattcagtatgatgttagctctgggtttgttgtgtatagactttattattttgagatatattccttctatgcctaatttgttgagagtttttttaatcatgaagggatgttgaattttatcaaatgtttttgttgttgttgcaatactgtttttttttttttttttttttttttttttgagacagagtcttgttctgttgcccaggctgtagtgcagtggcgcgatcttggctcactgcaacctccactcactgggttcaagcaattctcctgcctcagcatccctagtagctgggattacaggcctgtgctaccacacccagctaatttttctatttttagtagagacagggttttgctatgttggccaggctggtctcgaactcctgacctcaagtgatttgcctgccttggcctaccaaagtgctgggattacaggcgtgaggcactgagcccggctgttgcgatactcttaatgggttttatatttcctttttgtgggggacagtttattttgcattcttactacttttgatattctgacatcatcttataagtgggatttatattcactatgtaattgaagttttttccaatgaagcaccgtatatagtttatctgggaaattggctgaagaataaaatgtgtgatgttattcagtgtacagtttctaggtcatcagaagataccactaccttcccactactggaaaagaaaaaagaaaagttttccacagtgcctgaactgttttgtatgcttatcttttaaaattgccagaaatctcacttactggagattcagcagtccctttctgaaaatacacatactttagtgcaaataaagccagtggatctctttcttcataagtccttaaacctaatcgaggtcatctgtttggcagagataggagtaagataatgtgaaataggaaccaacgagagagaacttgcttaggagttgaaaggggtatggaaagatgttagaggtaaaatttgtcgaatctagtgttttgactagggcaggccagaatattcagtatcagtatcaatatcagaagcttttgtagcctttgtttagaaacctagtcatttggccgggcgcggtggctcacgcctgtaatcccagcactttgggaggccgaggcgggcggatcacgaggtcaggagatcgagaccatcccggctaaaacggtgaaaccccgtctctactaaaaatacaaaaaattagccgggcgtagtggcgggcgcctgtagtcccagctacttgggaggctgaggcaggagaatggcgtgaacccgggaggcggagcttgcagtgagccgagatcccgccactgcactccagcctgggcgacagagcgagactccgtctcaaaaaaaaaaaaaaaaaaaaaaaaaaaagaaacctagtcatttataacattttgtgggtgaatgacatcattaccaaacaaactttcagatgaaactttggaactcaagctgtaaattgtggatagctcatgtgcagtactacaaatcaaaacaaatactataaagtgtttggtagtccatttcctgaatgaaagtttgtccaaagtatatcaactttctgcagtcttacatgcagtagttattagttttgtgtatcgctttagtggatatttttaaaagtatcttcaaatgcaatgaattttaggaaacaaaacaattctttaaagcatcattagatagcttcttctttctgaaacccagaggaatttatgtataggatgactctttttttcaagtagttaagttaaggtgcaaaagtataaggtaaagtatattatcttaccattgaaaattttggcagtggcagaagagcgaacccttacaaataccttcattgggcaatacactaagcacttgctgtaatgctttttaaaacatctatactctggctgtggtattttaagtgaaaatctctcagtgagatactctttcgtattttagtactgatatccttaatattgctctgagagctaccttatactgacttcagtttcctagtgatttaaactactaatttccaacttatttttttttatagtgaaaactaaatattccttttgtagatgtaaccatttctggaagccctaagtatttttgaatgagtataattcatgcacactttaagagatttcaagcatgacaagtacagtgaataacatatatccatgtgattaccactgaggtttaagaaatgttaacatatgatatctgcttcagatatttatctttttaaaaatagaacattacagctgggcatggtggctcacacttgtaatcccagcactttgggaggctgaggctggtggatcacctgaggtcgggagttcgagaccagcctggctgacatggagaaaccccgtctctactaaaaatacaaaattagccgggcgtggtggcacatgcctgtaatcccagctactcgagaggctgaggcaggagaatcgcttgaacctgggaggcagaggttgcggtgagcgagatcacaactccagcctgggccacaagagtgaaactcagtctcaaaaataataataataaataaaaaatagaacattacagatccaattgactcttctttgtattgctccttttttttttttttttttagttttatttaaaaattttttttagaggctgagtctcacttggtggcctgggctggagtgcagtggcgcagtcatagctcactgcagcttcacactcctgagctcgagcaatcttcctgcttcagcttcctgagtagcttggactagcagaggtgtgccaccacatctggctaattaaaaaaaagtttttagagataggatctctctgtgttgctcaggttagtctcaacacctggcctcaagtgatcctcccacctcagcctcctgagtagctgtggttgtaggtggcagccaccacacctggcagtatcccttcttgagaccactgacctttcccagaagtaatcactgtcctgaagttggtatagattctttctgtctacatctatgcatgtttatgctcaaaaacaatatattgctttgtgtgtctttaaaatgtatataatggttttatgctatatctttctttctgcaacctgcatttttcacttaaaataattttgaaatttagtcctgtggatatatagtgagccaattaattctgcttagctactctgtagtctgttttgtgaatataccacaatcatctactttcttattagaggacaatttaggcagttccaattttatttttcccggaatgtacattattttagtcgagtgccattgccacattagcgatattttggttagtgagggactgcagataggaaggtgatcccaaaagattataatgccatatatttactctacctttctatatttacatatgtttagttacacaattacccattatgttacagttgcttacagcatttggtgctgtaacatgctgtacaggtttgtagcctaggagcaataggctataccgtataggtttgtgtaagtacgctctatgatattcatataacgatgaaatcacctagtgacacatttctcagaatgtatccctattgttaagcaacacatgagtgtgtgtctccatgcatatatgtgtaagagttagcatgtgtgtccagaggtagaattgctgggcgataagtcatactcatctttacctagttatgccagtttatactgtcactagcagtatatgagtacctgttatttatatcctctccaacacttaatattgctgacattttaacttttacaatataataggtgtaaaactattgtttaaatttgcatgttgtcctcattactagtgagattaagcatttttcatattggtcattgggatttccccttctgtgaattacttttgtatatttgctcattttttctgttgggctgtgtatttttttagtgatttgtataatttttcgttttttggggggtagggtatgctttggattctaatcctttgttgtaaatagcttctctcagacagtgatggtcttttcatgatgtttatagagtgttggatttaaattttatagttataattaccctttttttttttttaccttggtgatttgtgcttttatgtgtttttcaggaaatctttctccaccctgaagtcattttcttataaaagttttaaaattttgccttgcacattttggtgattgatcaggaatttatttttgtgtttggtgtgaattatgaactaattttatcttttccatatgtataaccagttgtctcaatatcatttattgagtccatttttttcctttactgatttgcaatgctatctctgtattatatccagttcccatatacgtgtgggtctaagtgtcgactctattccgtttcataattctttttgtccatatttgcatcaataacactgttttaattgctgtagctttaaaattattcttgttatttcatagggcgtactttcattacctttcttaatttggcatttcttggctcttttccgtacgaattctgggaacaacttaatccccactcctttaaaaaaaaaaaaaaagacactttggcctggcatggtggctcacacgtgtaatcctagcactttgggaggctgaggcgggtggatcacttgaagccaggagttcaaggccagcctggacaacatggcaaaaccctgtctctaccaaaaattagcgggcatggtggcacacgcctgtaattccagctacttgggaggctgaggcatgagaatcagcttgaacccaagaggtggaggttgcagtgagttgagatcgtgccactgcactccagcctgggcaacagaacgagacagttttttgtttgtttgttttaaagacacttttaaccttccgctatggatttttgacctacatttttcctcttgtattttataagagtagacacagagagcacttcaataaaattcagctcaataactttattaacctgatctccttttctttgactttaagctgaaagtgttaatttctcacaacttgtgctctatagatttgaaaccaaatcaattagcatcagctgtttatgagtaatgcagggtattttggtcttttgctaaattcagaaagaaatgttaaagtgctgatggatttgcactagctgtatagatctttggtggaggaggaaatgggaaaattattaatttcaggtaagaagtcatttttgaaatgcaagattcatttctttttaaaatcaccacataataaaaactttaagggctgcattggtgggtttttaaaaaaaattgtgaagtgtttttagtgttatgtgctgacaaatatttttgtagttgctttgacaagcaatgaaactaccaattatcactaattctgagtcttccaatgaacctctgtgtcaaatttttaaatttaattatcctatttttctcctagagaataatattgatataattttgtgaaccatagcagacagttcccattgctgagaatagagcctggtgtggggatattatgattcttgaatggttgaacaagacatttgcttctgaacatcttagtaaattatcacttctgacaatgtctgtagtttgaattttgatattctctgccaaggtattgaatactctaaataatgttgtttattctattatttaaatcattagtattatagatctagctttaaacagctgctgcactccagtcctttttcttcacctgcagatattgagtctgataactgttttgtatacatagcctttcagtaaatctacttatcagtcatcaaattaacttaattataagttaaatgatgagatggaccaagagtgttattgaaatctcatttccacacatttcttctcttcttttgtagaaggtaatgaaatgaacctgtcagtgttcctgtttttatgaagtttatttctcttagtacagtgattctgatagtgggttctgcagaccagcaaattagcattatctgagaacttgttagaaaagcaaattttcagttcccacttcaggctgactaatttagaaaccctggggtagggcttagcattctctttcaataaattctccaggtgattctgatgtatgttaaagttgagaagcattcacttagtgttttgagctctccaatttagttccttataaattgttgaagatattttttccagatttctttccaaatatgtgctcaaccttgttactgataggtttcaaggttatcgtcttcttcccattaataccttcatctatatccaattttcaaacttttaagaaagcatggctattttgctgcagtatggtgaattaggtactctgactgaccttcccagataaacaatttaaaattctagataatttttttttggagggaggacagggtcttgctccgtcacacaggccggagtgcagtagtgtgaacatggctgactgcaacctcgacctgttgggctcaagcgatcctcccacctcaacctcccgagtagctggggccacaggtgcacaccaccatgtccagcaaatttttttattttttgtgcagatggggtcttgccttgttgcacagactggtctcgaactcctgggctcaagcagtttttccacctgggcctctcgaagtgctgggattacaggtgtgagtgactgtgcctggcagatgaaatattttttaagtaaaaaccttatgtgcatggagatagctggctgaaaagtaaggaataatcaggccaaaaactatgtgaaggtgaaaacccagagatataagccaagtactgctgccttgaggacattatttgcaaatgacattacttggaaaacctagttaacttgtgcttgtgcctcaagaagctcagagaacggaagataaaagtagttttctggtagaacgtcccacctctcctggtaaagatggtaccccaagggtctatacatcataataaatgagaactagtaataaacgtaccttgtctaaggatcggaaagaaaaatttcctgcctcaaactttggtggtgatgggaagggtacagaaattccctgagaagttttacccacaagctgaccttcatgcaggtttgaatcctgattttatattacctggatggtatgaaaatcttaagccagtaattaaatataaaagtggtacaagagtgacgatgccttaaaatgcctaagaatgcctaaaaagcagcaaatacaaagcttcttgggagaacccatcttgatcttaggatttagaaaattcctaaacataaagctgtaagaaatatgaactcacattcacaaaatgcagaaagaaataagatgcaatgaatgagaggaagcagaaacaataaagagcagaatcagaacctgcaaagagttcacatattggagttagcagacacagattataagtacatatatttaatatgcttatagaaaaaaagaaatttaaaataggaatgaggagcaagtatacaaaaatgaccagtgtacaaatttaataacagattagacacagctaaagaaagatttagtaaagtggatctgaaaaaattgcagtatagaggcaagaaaatgaaaagtaataaaagagttaagagaatacagagggtagaataagaaggttcagtctagtcagaattctggggcaggggagcaggggcatggaaaagaatgaggcagaggcagtatttgaagagataatgacagagaactgatgaaaaacaacctacaaatttaggaagctaaagaatcccagaaaggataaaaagaaaaaaaattcacacataaacattttttaaagaaactacatgataccatagagaggtcttaaaagctgtcagaggctgggcatggtggctcacgcctgtaatcccagcactttgggagcccgaggagggtggatcacctgaggtcaggagttcaagaccagcctcaacgtggagaaaccctgtctctactgaaaatacaaaattagccgggcgtggtggtgcatgcctgtaatcccagctactcaggaggctgaggcaggagaattgcttgaacctgggaggtggaggttgcagtgagccgagatcgtgccattgcatgccagcctgggcaacaagagcaaaactccatctcaaaaaaaaaaaaaagctgtcagagaaaaaagatattaccttcaacaagtatttggctgtcagctgttttcctgtctataataatgaaagccataagacagggagtaatattttccatatgcttagagaaaataattgtcaaccaagaattgtatatcttgtgaagaatgggggcaaaattagacactttaaaacagacaaacactcaatgttgtaaccatcaaaccttccctactagtggaaattcagatcaatttcctgaaggctaaaaaaaaaaaaaaaaagtgaccactgatgtaaagtctgagatttaagaaggattgaagagtaaagaataatggtaaatctgtggatatattgaaataaatattggctttataaaatgatgtatgcggaggttttaaaaatagaactaaataggccaggtgtggtggctcacgcctgtaatcccagcactttgggaggctgaggtgggcggatcacctgaggttatgagttggagatcagcctgaccaacatggagaaacctcgtctctactaaaaatacaaaaaaaaaaaaaaaaaattagccgggtgtggtggcgcatgcctgtaatcccagctactcaggaggctgaggtaggagaattgcttgaacctgggaggcagaggttgcagtgagccgaaatcacgccattgcactccagcctgggcaacaagagcaaaactccgtctcaaaaaaaaaaaaaagaactaaatatatgataacaacatccaaatcaaaagagtggttaaagtattttatgatctttatactgttgaagagaaaggtaaagctattcaattaactttagattttgataggtatgtgtattagtattttcagagtaactactaaaataatataaatattaggaataatttatagcagaaaaaacaatttttaaaaggcaaggaagaagtgaaaaacatagaaaaggtcagataaagaggaaacaataaaatatagaaatcaaatcaaatatatggtagactaaatgcttcattcagacaaagaatgtcagattggattatttaaaagcaagcaggccgggtgcagtggctcacgcctgtaatccgagcactttgagaggctgagacgggtggatcacttgagatcaggagttcgagaccaccctggccaacacggccagctggccatggccagctaatacaaaaattagctgggtgtggtggtgcacacctgtaatcccaggtacttgggaaggtgaggcaggagaatcacttgaacccaggaggcggagattgccgtaagccaagatcatgccaccgtactccagcctgggcaacagggtgagactctgtttcaaaaataaataaataaataaataaaagcaagcaaacaaacttactgaaacaacacaaaatccagctataattttcaagagagatagctaatacatatgaatgtagaaagatagaaagcaaaaggatggaaaaagtctatcaggcaaactctaaccaaaagggaggtaaactaactatattagcatcagacaatatgatctttcagacaaaagagacagctagagataggtccctcaacaatgagaaaaggtttatttatccataaaggtaaaaacaattccaaacttgtgtgaacctaataattgcctcaatatacaaagaacaaaatgacacaattataagatgaaatagacaaatctaccatggtgaggagtttcaaaactccctaattgaaaaattaaaaagacaaaatggttacagctgaaaattaaaattaaaaattcattttctcggttgcaatagccatttttcaagggcttactagtgacatgtgacaatggctgctgtattggacagcacagaaagtacttttgcactgcattaatttagaagacttaatataattaacaatattaataattgagtattgaacaccacatccaaggtgcagatctctgaataatatctgatcataatgtgggcaagttagaaattaatgacaagaaaaggcagaaacatgggagacaggtgaagatttcttaaacagaatataaaaagcactagatacaaaggaaaaaagtgattaattggatttcatcaaaagacactgacttagtttgcttaggctgccataacacaatactatagacttggtggcttaaacaaaagaaatgtattttctcacggttctggaagctggaagtttgggaccggggtgccagtatgactgcgttttggtgagcactgtcttcgtgacttgcacacaggcttcttgccacgtgtctgtgtggcggagagacagcaagatctcaccatctctcttccttttcttataaggccacagtcttgtcagattagggcccttcgcttatgacctaatttagcctcaattatctcccaaagtccctatctccaaaatagttggggtgggggaagcgccttgactaatgaattttgttgggggcagtggggagtgcacatttcactccatagtagacaccattgaggagaaagaccagagtggaagaaggtatttgaaatacatgtatttgacagccaggcacggtggcccacacctgtaatcccagcactttgggaggccgagccgggcggatcacgaggtcaggagatcgagaccatcctggctaacacagtgaaaccccgtctctactaaaaatacaaaaaattagccaggcgtggtggcgggtgcctgtagtcctagctacttgggaggctgaggcaggagaatggtgtgaacccaggaggcggagcttgcagtgagccgagattgcgtcactgcactccagcctgggcgacagagcaagactctgtctcaaaaaaagaaaagaaaaaaagaaatacatgtatttgacaaggacttgtacctggaatatataaagaactacaaatcaagaataaaaagaaaggacagaaagccaatggaaaaatgaacaaaggattcaaacagggatttcacaaagaacttacctgtaacgtatgttaaatgctcaacctcattagtcatcagagaaatacaagttaaaacctcagggagatattactacacacccaccagaaagttaaattaagaacacatttgtcatgacaattctgggtttgattttgttttgttttttgagatggagtcttgctcttgtcgcccaggctggagtgcagtggcataatcccagcttgttgcaacctctgcctcctgggttcaagtgattctcctgcctcatcctcccgagtagctgggattatgggcacccaccaccacgcctggctaatttttgtattttagtagagatggggttttgccatgttggccaggctagtcttgaactcctgatctcaagcgatccacctgccttggcctcccaaagtgctgggattacaggcatgagcccacgcacctggcctgtcatgacaattctaagtggtgatgaggatgtgcagcagctggaactgatgaaaatgcatgagcacaacctctttggaaaactagcagaattccctaaaactgaatgtaggcatgatgcccatgacccagcacttatagtcctgggggtgggaggagtgaatatatttctattcatgatttctatctctgatgacagaaattaagctagtgggtatctgtggttgagtagaaggatagtgactaggagcgggcagtatgagatgctggtaatgtcctcttgacctaactgttggttaccctgggtgtgttcacttgtagaaattcattgagccaaacacgtacaatgtatgcatttttgtgtatatatgttcttcttcaataaaaacttgatttaaataatgttctttttcttaaactgggtagtaggtttatggtgttttatgtgttgcctgtgttttatacatattttattcctgttcagtgtccaaaaaatataaaaagtagtcactgctttgttgttaatttgagcatctcctgcacctagcacagtgcctggcacattatagatatttattaaatatttgttctatggaaaagaagtaggctagtaatttctttttgctttccaacagccagtttttgattcaattatttgtaaatatgatttctactcagttgtttctaaataataaaatatgtaaatactattatgtttatatttattagtaagctgaatttattaaatgagaaacctctcaatattaaggacacatcataaattattagcatgctgtgttataatgactaaaagtagtatcaacaatttagataagtatagtgtggccttacggatgtaagtccgtaagatcatgcagcattgaagatgtgcagtttactagatcttctaatattctcgggtgtctcactgtttcttttttcttttttttttttttttgagatagggtatcactttgtcacccagtctggaatgcagtggcgtgatcagggctcactgtagccttgacctcctgggctcaaacctctcaccttagccccctgaataacggggattactgatttgtgccaccaagccaggctaatttattttctttctttctctctttctttctttctttctctctctctctttctttctctctttctttctttctttctttctttctttctttctttctttcctttctttctttccttctttctttcttttctctctttctctctctctctctctctctctctcttcctttcttcctttctttttgtagagtttgggtctcactatattgcccaggctggtcttgaactcctggcctcaaatgattctccctccttggcctcccaaagtgttgagattatagttttcagccaccgcacccagcctcactgttttcttcagttgtttctgaacaactggaatctcagctgtctttttccattaaatcccgtgttcgttcctccataccatgctgcctcttgcccatttttgcatttctcctttctgctttcctgaacatcctgagtcttactgggctggcattcccttgttgggacaggggagaggctctaggccttggatccttgttctgattccttctccaaagagttttccctttttcttcccctttcaaaacaacataagtgcaaaagctttgtcaggatgttgggaattaaaaaagcttcagaaacattttgattcatttaacaacattactctgaaactttttagagtaagagtaccaagtcactgaataagacgatcttgaaattaaacgatattttacagttttaaaaacaccttcacagatcttttcttattagattctcagcacaaccttatgagttggcactgtcaaaattcagttcaacaaacaaaatccaactaacaggaaaactcacagctaacatcatacttaatggttgaagactgaaagctttcccccttaagatcagaacaagacaaggatgctcttgccactcctattcaacactctattggtggttctaggtggggcagttaagcaggaaaaagaaaatacatttatatcagaaagaaataaaactatatttaccgatgacatgatcttacatgtagaaaaatcctacagaatttaccaaaaaaaattggaactaataaatgagttcagcaaagttgcaggatacaagattattatctaaaaatcagttgcattcctatatgctagctatggataatctgaaaatgaaatagaaaaaattccatttataataacatcagaaagaataaaatacttatgaataaagttaaccaaagaagtacactaaaaagtacactaaaaaacagaaaacatgttgaaggaaattagagatctaaataaattgaaagacgtcctgtgttcatggcttggaagacttaatattgttaagatgacagtgctacccagatttatctacaggtttaatgcaatcactatcacagttcaactgcctttttcccggaaatggacaacctgatcttataattcatatggaattgcagagccatatttgccacaacagtcttgaaaaaaagagaacaaaattgtaggactcatacttcctgatttcaaaacttattacaaaactacagtaatccagatggcatgtcactggcatgaggagagtcttgtaaaccaatggaatgcaatttagagtccagaaataaacccatacatttatggtcagttgattttgaccagggcgccaagatcattaactggggaaagaataatcttttcaacaaatgttgctggggcaactggatatctacatgtaaaaaaataaatttggatccctgcctcacatcacataggaaaattaactcagaatggatcaaagacctaaacctgttaagttcttcgaaggaaacataggtgaaaatctgtatgaccttggattaaatggtgatttttaaagatataacacaaaaacacaagcagtgaaagaaaaaggtagataaactggactttgttaaagttaaaaactttcatgcatcaaaggacactgtagaatgaagacaactcacagaatgggggaaaatatttgcaaattatatctctgataagtatatatattttatatatatgttgtttatatccagaatatgcaaagaaccctttcaactcaacaaagataagacaatggaatttaaaaatgggcaaagcatttgaatagaatagacatttctccaaagaagatgtacaaatgacctataagcacatgacaagatcttcaacatcatagtccatagggaattacaaatcaaaaccacaatgagagataacactttacaccctctaggatggtcatacttttttttttttttttttaaagacagtaacaagttttgataaggaagtagagaaattggagccctcattgctgatgggaatgtaaaatgatgcagctactgcacaaaagttttgcagttccttaaaaaactaaacatagaataactcagcaattctactcctgggtatagacccaagataattgaaaacatatgttcatacattaacttgtacatacattaacatgtggcattattcatagttgccaaaaagtggaagcaacccaaatgtccatcagctgatgaaatgataaatacaatgtggtatatccatacaatgaaatcttatccagctgtaaaaaggaatgaagaagccaggtgcagtagctcacaactgtaatcccattgctttaggaggccacgatgggaggattgcttaaggccaggagttcaagattggcctgggcaacatagacccagtctctacaaaataaataaataaaaagaatgaaatactattacgtgccacaacatgaaccttggaaacattatgctaggtgaaaatccagtcaccaagatgacgaattgtatgattctgcttacgtgaaatgtccacaataagcaaattcatagagacagaaagtagattagtggttgagaaggagtgagagaagggatgaattgagattaacggctagtagggacagagtttctttttggggtgatgggactgttctggaattagatagtgattatggttgtacaacatagtaaatatactaaaaaccactcaaaggctgggtgcagtggctcatgcctataaccccaacactttgggagactgaggcgggaagattgcttgaggccaagaggtcaagaccagcctgggcaacacagcaagaccttgtttctacaaaaaaaaaaaaaattgttttaattacctgggtatggtggtgtgtgcctgtagtcccagctactttggaggctgaggtgggaagatcacttgagcctgtgaatttgaggttacagtgagctgtgattgtgccactgtgatccagcctgagtgatagagcatgaccctgtctctcaaaacaaaaccctccaaaaaacaaaaaccacccaagtatacattttaaatgattaattttatgtgaaatatatcagctgggcgtggtggttcacacctgtaatcccagcattttgggaggcagaggtgggcggatcacgaggtcaggagatggagaccatcctggctaacatggtgaaaccccgtctctactaaaaatacaaaaaattagccaggcatggtggcacatgcctgtagtcccaactactcaggaggctgaggcaggagaattgcttgaacccgggaggcagaggttaaagcaagccgagatcatgccactgcactccagcctgggcgacagaacgagactctgtctttaaaaaaaaaaaaaaaaaaatctcaaaaacggcaatgagaactcaattaatatttatcatactgtatattccctgagtggtgcaggagaatcagagcttagaatcttgtgaggaaggcatggtacttaaataagtctagtgtaaggcagcttgtaataagtagtactaagactgctgaagaagcacaaataaaggagatattctatcttactaggaaccagggagtttcacaaacttggctttgcaaggtgggaaagattttcacaggtggaaggggtttgaaatagggaattcagtcaaaaggaatagtgtgagtgaaggaatggagtttggaatgtggggtacatggggttggggtggggtattgaggtagatgacgcagaaaaataagttaaagatagatcttgcataggtggctgtgagtagcatgctaaggagtttgggctttattacttatgaatcatatttttggtttcaggtcatgtctggtggcagagggaaggctgaattggaggagaacaaaagctagaaccagggacaacaattattaccattgtagttttttaggagaggtgatatggctgaactaggttatggttgtgaggctggaagggaggcacatccacgtgacagtgcagtagacttagtagactcttgattgtttatgtgtgcattccagggataggcagtgaagggaagaatgaccctgaaatcttgaatttaatgacttgaaaggataatgatggtattaacagatgaggaacatagcaagacaaacaaatgaaaaagtgaatactgaggagaaggaggtaccactgaatttggcatttagtcattggtgattttgaagacagcagttacagtaaagtggctgctggaaaggatttcaaagaatggttgaagaagatagccataggatgagaacatggaaggcaaggaagggagacttgagagatttggtaataaagagaagagagaaaagggtgctagtttgaaatgagttaaaagaactacagagtagaattaaaataaagtagaattatgggatttttgctttttaagtgacccatgagaggcttactggcagtgtgccaagattcaagagagcaaagattggcagggtgggattaagtgatgggatagccgggtgcagtggctcatgcctgtaatcccagcactttgggaggctgaggtgggtggatcacttgaggtcaggaattcgagatcagcctggccaacatggtgaaacctgtctctacaaaaaatacaaaaattagccgggtgtggtggtggttgcctgtaatcccagctatttgggaggctgaggcaggagaattgtttgaacctgggaggtggaggttgcagtgagccaagatcgagccactgcactaactccagcatgggtgacagagtgagactccatctcaaaaaagagaaaacaaaaaacaaaaaaaaacgacggtagggagccttctgcctctttaaacatttgagatgcatgtcctgagatgcttctgtgaagttaagaatattaattttttgatacgaatctgacaaaactagacatcaaaatatgccatatatggtaattaaaacaatgtggtattagtatagaaagcagacaaatagttaatgaagtagaacaaccaacccagaaatagaaccagatacacctgaaaacttcatatatgaggtttaaaatcagtgtggaaagctggaaatcacccatagtttcgttatccagtcagttgtttttcacattttggtgtgtttccatttagttggtttgccatacttttttaaaaataatgctttaaggctgagcgtggtggctcacacttgtagtctgaagcaggcagatcacttgaggtcaggagttcgagaccagcctggccaatctgatgaaaccccatctctacaaaaaatacaaaaattagcctggtgtggtggtgcttgcctgtagcctcagctacttgggagactgaggtgggaagatggcttgagccagggaagcaaaggttgcagtgtgctgagatggcgccactgcactccagcctgggtgataaagccagaccttgcctcacaaaaaaaaaaaaaaaatgctgtaaagtaaaagttctgtatacaattctgtgatatgaaccctaccttagtgtgttatgaggattttgatccttatatgatatgatatatataatcaagtgcgggtacgttgtagtttacagaaccattactttgaaacaagacctttaggttactcctaattcatcactgttaaaataatgctgtagggaaaaaattacacataaaagttttctatatttaaaatgatttttgtgagacaaagtttatttattgtaaaaacagttccagcagttcagaattgtaaagagttttacagaattgtaaagagttcagaattgtaaagacattttcttgtctttctccttggtggtaaccactgttaacagtttagtgtgtatcttttttttaagtttagtttttatttttttgtagagacagggtcttgctttgttgcccaggctggggtgcagtggtgtgatcatagctcactgcagcctcatactcctgggctcaagcagtcctcccacctcagcctcccaagtagttgggactaccggcatgtaccaccacgcctggctaatttctgtatcttttgtagagacagggtttcaccatgttgcccaggctggtctggaactcctgggctcaggcgatccccctgcctcggcctcccaaagtgttgggattacaggcatgagccactgcacctggactagtttctttttaatttctgagtagtagtcaattgtatggctctcctataatttcttcattcattcatcttttggtagacattcatgttgtttccatttttaggctattatgagtacagctgttgtgatcatttgtgtgcgagtctttgtgtggatatattttcatttcttttgactaaaaacctaggggtgcacttgttgggtcacattaactttgtagaaactgcattgcatctttgccgatattgaaagttgtcagccttttatatttttctgtgcatgcttttccccccaaaagaccaaaatgggaattgtttttcttttcattataaacttgtaaaggaattttaaagttctaagggatgccaggcaggaggttcatctatgtgaacagttattagtttgagatagataatgtcaaggatatccctaaaggcttttcaagagataactataggacatataagtttaacttatttctaccccatcacttctagtcacatgtgacttcagaattttaacagaaattattattataggaatatgtagcacagagggattccataggcctgaagattagtactgatggcctttcttgcattattctaggctagtgctatccgatgaaactttctgcagtgataaccactagccacaggtggcttttgaaacgtagggctagttcaactgaagaattgaatttaactttaaattaatttgaatagtgaaatatgtctagtgattaccgaacagtgtagttctgaaatgttatttttcaggaaagatcctctagcaagaagtagttgagtgagacctgttagctgagctggccctggggcaggtttgtgttttcagtccttccctttcctgtgggagaaatgaaaccaaagcctagagcaccacagaagaagaaccagtggattcataagggtgacagttcaggtaggggaagctgtttggtaatgagctcttttggtcagatgccacactatttttctttctgtttattttgccctattaaattatttagtaaatagtaaagcgtactttaatccagtttttaaagtggacgtttggatgaaagtatgtgatttaaattccaaaactgtgcagtgttgtccagaagagtcctgattaaatcaccccagtttctttgatgaagataagcaaataattttattttttgctgtaatcccagctactcggaaggctgaggcaggagaatcgcttgtaccagtccggaggctgctgccctctcacagggcttcctcctcttgcacagacgcaccagtgccttcagccccactggtctccctcttctcctttcctggcccctgctggcccagtagatgggccactggaggccactagatggggactggggaatgtgatgttggcgatctgcggtatcttcagggtgacagccatacccaacgcgtgggacctggcttccacatctatagacctgacctaaggaaatatgtgggcgtgtgcataaggatgccatctcagaactgcatattaataaaaagctgaatcaaacagtgtccaacaagggtggctgttccagctggtcatctacaatctcagctcactgcaacctccgcctcctgggttcaagcaattctgccttagcctcccgagtagctgggactacaggcacacaccgccacacccggctaattttttgtattttagtagagatggggtttcaccatgttgcccatgctggtcttgaactcctgagctcaggcagtcctcccaccttggcctcccaaagtgctgagattataggcgtgagccaccgcacctagcctgtactttcatttcttaataactgcatgactgtagtggttggctttcattattgtttcctaggggcaaggtcaatgttagaaaaattgtggaattttcccttggcattgctgtggtgagtagacagctactatttatagagacttatacttcgttgaaaaaatgagataccatgcttggcttaccataaaaacacagatgtttctggattccagtagggaggccttttgttcacagcatctgttttggttggccagccagatgacttctgtggattttttcactccttttgaaggacacttgacaaataaacaagtttataaatgaaagagttaacagcattttgtaaatttattttattactttagctatatcgttctgtatattttgaactatcagatcattttagctcaattttatcacttcctaaataaccttgagacgatcagtcctttgttacatgttctttggattgtttattctgcagttgagacagatttttattgatctataaatttttgtgttcaacaaacatttaatgagtattcactgtgtactaggccctgtactaacactgggaactacatatgtgagcaagatatagtctcagtctttgagaagtttagtgtcttatatgcagtgcaaacatgtagacagaataaaattatagttgagtgcttccatttgaagtttatttcatcagtttagtggggaggggtaggtgtctaggaatgccttccagaaaaagtagtgtctaagtggagaattgtagaatgagtgggagttgtccagggatggaacaggggttagtggcggagattatataaaagaaagaagcttgcaggtgaaaatgaccctgggaaagtgggaaactgaaaaagttcagtacatttctgtcatatggctgatcaagctgtgactgggcaaaatgctgtcagcatttgttgaacacataaatgctgtctcattcacaaaggagacttgtgacctagactttattcatcttgtgctaaattagtgatttccaaacatttgatcatgaatctcataagtaaaaaatgttttgattatgtatcctcatatattgattatatgccaatatttgtttatagatgatatgtagtactaaaagttatatacgcagtagaacatgtatagaaaacaaaaaaaattaaaaggatgagctaaagatggcatgtacaatattctcacagtgttaattttactgaaaatacggaaagtaggctgggtgcagtggctcacgcctgtaatcccagcactttgggaggctgagggaggcagatcacttgaggtcaggagtttgagacaagcctgaccaatatagcgaaatcccatctctactaaaaaatacaaaaattagctgggcatggtggcacacgcccgtaatcccagctactcgggagggtaaggcaggagaattgcttgaacccgggaggcggaggttacaatgagccgagatcatgccactgtactccatcctgggcgacagagcaagactccatctaaaaaaaaaaaaaaaaaaaaaaaacccagaaagtaaagtggtacatcattatttaaaatcttcgtttaatattatgtgatacagctgctcagagggctgtttctaaattcagtttattttgatactttaatggcagtcaaagcctggatcaaaatggaagaatttggctgcactttctaaatcatattctttctttctccaaacttattcactatttatggaaatgctttattgaaatgtggctggtaaatatccatctattagtttttcttgcagattaataaaaatatattatacttttattgtgttaataaatgggttccaaaaatcactgttaagtcttcatttggaagatattttaaaaagttttagaatattctgtttctgactttataaagcatgaagatacgagtttttggtgtctttattttttagattttgtatatattgtttcaacagcagaataacttagcaatggaaatgtttccaattatccaattttgaaatgctctattaggaaagatttttttttctctcgctctctttttttttttttttttttttttttttaaagatgaagcctctctcttgtccccaaggctggagtacaatggtgccatcttggctcactgtaacctccgcctactgggttcaagcgattctcctgcctcagcctcccgagtagctgggattacaggtgcccgccaccacgcccggctaatttttgtattttaagtagagatggggtttcaccatgttggccaggctagtctcaaactcctgaccttaggtgatccgcctgcctcattctcccagagtgctgggattacaggcgtgagccactgcacccggccgatttttttctctttttcttttttctggaaaagctgaaaataattctgacatgttgctaaacatttttattttgtaggggcagagtgagtttttttgtttttttaatatcttcttggtagcatactacttataacctcctcagaaatatttagcaagtttggaactctagtctttttattttaaaaaaattgtgtaactcatctacatttaacaaatcttttaaatacatttcttgtggtaactagtgaatctgtgtggatttaaaaacaaaaaaaagattatgaggccaaggcaggtggatcacttgaggccaggagtttgagaccagcctggccaacatggtgaaaccccatctctactaaaaatacaaaaattagtcagaagtggtggtacacaactgtagtcccagctactctgagctgagaatgcgccactgcattcaattctgggcgacagagcaagactatctctcaaaaaaaaaaaaaaaaaaaaaattcagtggctactctctatctcccagagtataggaagattctatattcatacagttaacctcagtgacatctgaggtaccttgttctgacttaattgcagcaatagtttacctgtgaatgaagctgttaaaggcttttgtatcagatgctatcactgtaactttgttctggaattttttttttttttgagatagggtctcgctctgttgcccagactggagtacagtgacacgatctcagctcactgcaagctccgcctcccgggctcacgcctttctcctgcctcagcctcccaagtagctgggactacaggtgcccgccacaacgcctggctaattttttgttattttttagtagagacggggcttcaccgtgttagccagcatggtctcgatctcctgacctcatgatccacccacctcggcctcccaaagtgctgggattacaggtgtgagccaccgcagctggccagaattcttttttaaaattccagtcaaagcagtcatttcatcagtggttacagttttcccataaagcaccttgtttcatttacagttaagaatacctcccttttaatacattgttccttggtatcttacaaagttgtatttcctgtatatttcataattacccagcaaataccctaagatgaaagaatcatctgtatttttatccaattgtatagcaaaccccacacactgtatttgtcctgatatcttcaagtctttagggttttctaagagcttttgactatacttaccaataaaagaatacatttagtttgtcaccacttttatttctgtgtataatttcagctatggtccttggctttttttagggaaaccttagcagtttcgacactaactttcgtacaattttgtgaagtgtcacattaaatagcctgtgactttagacataggtggaaaaattatagacgtttaactcttgcagtgaacacttaaaagcctggtggattatgaggactttgttcgtgccatcagattatatcttaaggtagagtagacatgtagagtgaggttcatctttaataaaaaatgggctgggtgcagtggctcacacctgtaatctcagcactttgggagaccgaggtgggtggatcacaaggtcaggagatcgagaccatcctggctaacacggtgaaaccctgtctctgatgaaaatacaaaaaaattagccgggcgtggtggtgggtacctgtagtcccagctacttgggaggctgaggcaggagaatagcgtgaacccgggaggcggagcttgcagtaagccgatatcgcaccagggcagtccagcctgggtgacagagtgagactctgtctcaaacaaattaaaataaataaataaataaataaataaataaataaatggtgtggctggacgcagtggctcacgcctgtaatcctagcactttgggaggccgaggcgggcggattgcctgagctcaggagttcgagaccagcctgggcaacgtgatgaaacccccgactctaccaaaaattcaaaaattagctggagcatgcctgtaacccagctacttgggatgctgaggcatgagaatcgcttgaaccagggaggcagagattgcagtgagctgagatccaccattgcactccagcctgggcaacagagagagactgtgtcaaaaaacaaaacaacacataaataagaaattgtgtgaagtcaatataaataccagtactaatattttatttttataccccaaaggattatcgtataatacaaacacccttcaagtacacatatcccactttggagactaatgccctaaacaacagggataatgatattgaaactggccttttagttaaaataaaagcaaagccaaaaataattcactttcctctataaatttatatttgggagacacatttaagaataatcgtcctggccaggtgcagtggttcatgcctgtaatcccagcactttgggaggccaaggtgggcggatcgtgaggtcaggagatcaagaccatcctggctaacacggtgaaaccctgactctactaaaaatacaaaaaattagctgggtatggtggcgggcacctgtagtcccagctactcaggaggctgaggcaggagaatgacatgaacccgggaggcggagcttgcagtgagccgagatcacgccactgcactccagcctgggtgacagagtgagactccatctcaaaaaaaaaaaaaaaaaaaaaatcagctttggcttgaggtttgaagaatgaacccttcagtcatagactatgactacctgtcatagctcactaggaaaccctagggaatcatggaagggttattggttaaatatattatataaaggaacattttgctagttgctattgaccaaaaaggctgtttttttttttttaaatatagtctgtaattatttttgttgaaagatatttggaagatggtttttctcaatctataggagatacagttcgtagccacctgggatctcttataaaaagatactttttcatagtatactctttataatatgcataacatttcataatatacttttgataatatacataaaatttgatacataagtttaccaaatttattgaatttacttcagtgcatttttattagtcaagattctttggaagatatggaaagctaattcaaaaaagcttgagcaaaaaaaatttgttggctcgtaactaatgttcaggactggtctcaagaacttggttgccagatctgtgtttccaggttatctattagcttgtctgtgtctctgtgatagttttacccttttagagtggaaaatcttcctccttgtggtgctctggcttgcagaagaatgcctttggtctagcgccagcatatataaaatcctgtgggtgggatagagtagatgtggttgcatgtgtgctgactggcagtctcactaaaccacatggaatgggaaaggaacagtttcccaaaggaagggtttgctcttaatgcagaggaagggatgctgggagtcaaaaataatagatgttcattatagcaatgagtgatgaagagaggacagaaaggcataaaatattctttaagggaatagaacatgacttaatttgattttcctaatcattgattcttacagagcatgcaagcggcaagatgtcctacagatgaattatctttaaccaattgtgcagttgtgaatgaaaaggatttccagtctggccagtgagtatctgactttgttttcttttaacctgctaagtggcattcgggaaacttccagagagtcatttttaggaaacgttggaaaatatttttaaaaaattcttgctgagttggaaaatggagaagatgagaaaaagttatgtatttgaatcattactgtgtcaaactttgataaatactgtataatgttttaaaaatgttttatgtataaaactctagttttcatcagttttcttagtagagctaaacatactggttgtatgaatcatatatggcagagttgttaggtgtttggttctggcaaactcagattgtttgagttttcctggctctaccaattacaaactgtgtgaccatttctgtacctctatgtcctgatctgtaaaatggagatgatctcttcctcaaggtagctatgaagattgagttacataaataaagcacttagaacagttcccaacatgttaacaatcccttagtaaatattagctgttatgattattattaccatgataatccaagagacatgaacattggaagatgggctgggtatggaggcttacgcctgtaatcctagtactttgggatgccaaggcaggctgattgcctaagctcaggaatttgggaccaacctggccaacatggtgaaaccccatctctactaaaaataaaaattagccaggcatggtggtgtgcgcctgtagtcccagtttctcaggagactgaggcatgagaatcacttgaacccaggaggcagagactgtagtgagccgagatcgcgccactgcactccatcctgggtgacacagcgagactctgtctcaaaaaaaagtaaaggaaaaagaaaattggaagctgcaaagcaaatgtagaatccttaaaggcattttgcactgtaatttattttaactgatccatatcaccgcactgccaggacttctaaagaccctgctgcaagttcagtgccatccatatgcttctgagattggtacagataaggagatgaaggggctgtagggaaataagaggcaaggtggtagggttttaactgagcatttttcttaaaatgttatctgtgaaatacctgagtttcacagagttagaaatgctaatcatctttggtttccagcttcagagtaagaggctgtactatatggtgatattaacattgtttccagtgctaaacattctgtgatgctaaattgagcacaggattttcaacagataaactgaagtatagataatcaacgtgagaatttgtggaattcttttacatatgttaaatgttcactgtactcatggtggggttactcaaaatgtagttgatataaggaacatgtgttctagtggcaaaaaaaatacgtatagaaacattagccattgatgtgaaaaattacagcattctgaaaagataatgtttaaaaagatagtgagctaggcatgttagggcatgcctgtagtcccaactactttagagactgaagcaggagaatctcttgagcccaggagtttgaggccagcctggtcaacatagcaagaccacatgtattaaaaaaaaaaaaaaaaaaaaaaaaaaagatactgctgctgcataacaggatttgaagcttctatcttacacatagtactttttagttacctggtataggagattatcatgagaggactgttttttttttttttacaggtaatttctgaacagggaattagcacaaaattttttaaaacagtaaatattgatatctacatgaaagctgatgtattttgggaattttttaaatcttttttttttttattttgtaggttgtttttgttttagcctgttgagagagtctgcaaataaatttaatgagtagtctaaaaactaacttttttttgattgctatatcctagctcttttatctttggctctcttctccttattaggatgtgaagtaattctcaggagaggaaatgcatctagtttttacttgatatcaaggactctaaatcactggcttcagttttatgtaaactggaaatgtaaggaagttggtattttggatggtattttggctggattctacttgatgagtgtttgacccaaggtgctccttatatctggaaaacatttgggattgctgatagtttgggaaactaaatttgtggttctatttcttcaagacacagatagtgtcgtttccacctgatactcattaaatatcagtttgacaagaaatacattttgaaattatgttcttcatttccttcaatgtggagtactaactgtgtttctgtcctttaggcatgtgattgtgaggacctctcccaatcacaggtacacatttacactgaagacacatccatcggtggttccagggagcattgcattcagtttacctcaggtaactcagatgttaatttgttctcttctgtttttgaaagtcatagaatatgaataatctgttcattttaagcaagcatcaccctgtgactgtattgattcatattgaagaaaaatatctaagtattatataaggaatttaaagatacagtcttctttttttttttttcttttttttttttaagacagggtctcgttctgagacccaggctggagtgcagtggcacgatcatggctcctggtctcaagcaattctcatacctcagtctcccgagtagctgagactacagtcttgtaccactgtgcctgactaattttaaaattttttgtagagatggtgtcttaactgtgttgcccaagctggtctttaactcttgggctcaagtaatcctcccaccttggcctctcaaagtgctgggattatagggtgtgaatcatcatgcccaacctaaagacagattcttaattgccagtttttgctatggctgccttcttttggcttgattttttttccctaatttttaaagattttgcagtaaaatcagtcagctatcacataaagcgtcaagttattttaatgttaactgccagggtaatagaaaagtagaaaacattttatttgtgaagttgatatctaagaatggtgattttataatgtgatggcgttatactaaagaatttggaaagagtctcaaattacaacataatttgctaggctcccataacaactggatgggttgtgattacagttacaactgttgatggattctgtggaatccagagaattagattgcttagtgctgtcccaggcacatcatacataatataaagcaccaagaatactagtctgtatcctcttctcccttatcattttactcaggctgctgactgtccccagtcctaagtaatgtaaatggaattcctacctcctcctagtatgctaatgagcattggttgacttccctgaaggtttagagaaagagctcaaacactcatttaagaactattaggctgggtgcaatgactcatgctggtaatcccagcactttgggaggccaaagctggtggatcacttgagtccaggagttcaagaccagtgggcaacgtggcgaaaccccacctctactaaaaatataaaaattagctgagtgtggtggtgcatgcctgtagtcctaacttcttgaggggctgaggcaggaggatcacttgagcccgggaagttgaggctgcagtgaggcgagatagtgccactgtactctagcctaggtgacaaagtgagaccctgtttaaaaaagaaaaaaacaaaaacaaaaactattagatgggccaggtacctcacgcttgtaatcctagtgctttgggaggtggaggaggatcgcttgagaccaagaattccagatcagcatagcgagacccttgtcccccgcactagtctctacaaaaaaaaaattttttttaattagctgggcatggtggcacatgcctgtagtccaggctacctgggaggctgaggttgggaggatcacttgagcctaggaagtcgaggctgtagtgagctatgattgtgccaccatgctccagcctttgctccagagtgagattctgtctcttaaaaaaaagggaaaaaaaaggaactattgaagatctcttgaagccctcaaaaattacaggaaattttcacttactattccacctgtctgtttgatgcctcttcattatccagaccactttcacgtttgtttctatagattaaaagtttgggatattccagggttctccagcttttacagagttccatttgggattctgattgttagcaatagcttgaggtgtgacagtttctccttgtctctgttttgtaaaaaaaaaaaaaaaaatttccccgacattcactgtaggccagcctctattctaggtactttggcatgtgttagctcatttaattctccaaacaaccttatacaatagctactgttgttatccctaaggactgttgtattagtccattttcatactgctatgaagaaattctggagactggataatttataaggaaaaatgagatttcatggactcacagttccacatggctgcagaggcctcacaatcatggtggaaggcgaaggaggagcaaagtcatgtcttacatggcggcagacaagagagcgtgtgcaggggaactgccctttataaaaccatcagatcttctgagacttactcactatcatgaaaacagcatgggaaaacccacacccatgattcagttacctcccactgggtctctcccataacacatagggattatggaaactacaatttaagatgagatttgggtgggggcaaagccaaaccatatcagctgtctttgggattgaagtacagaacctaaatgtggcttccttgtgacttaaagtctaagcttaacgagcatggtgctaaatttcaggttggccagaagtgggatggggttttacagaagaggtcttctgggggaggtgaagggcagagtggagggaaacaggatgtggtaagaaagccacaagggagagcacttgttgcacatattcacagttcagtgtcttctaaattacccgccacaaagtctgcagtgtttggatgggcaggtgaactactgattttcaaccaaaaattgtttttctcattgttctttggagtgttatcagtaattactaattttgaatctataccaagcaaaccccagattcctgcctaaacacaatctggcctgccttcatacttcttgccattgtaaacagtagggatttgggaaagcctgaaatctagctgtaaatgtctaaaaatcttctggctagtatacaaagagtagccatgaccatctaatgatttcagtccctgactgggtttcaaaatagattttctgaccagttttaatttagtcttcatgaattgaatgtcttcctttttgagatactgtaacaaacagtaaaactaactgcagcagtacatttagaacactgaagtgtgatctgatacagtgaagaccttctgtagcatcatattgtgcaaaggaacatcctcctcagtggtgccagctttactgcaaaaggcaagctttgcacgttttgaaacagatgttcagatgtaaactgtagcacatgctttactttcctagggtaagtaacaaagaaccattactgggtagcttaaaacaacagagatttattctgtcaccgttgtggaggccggaagtctgaaatcaagctgtcagtagagctattccctctctgaaggctctagggaagaacctgttctgtgcttagcttctggtgttgccggcaatcctttggtgttccttggctgtagctgcatcatttcaatttctgcctctgctatcacatgatggcattctgtctgtgtgtctatgtctctttcttagaaggacaccagtcatatcggcttagggttcaccctaattcattatgacctcatgttaacttgatacatttgcagagattgtatttctaaataaagtcacatccacaggtgttgggggctaagacttcaacatactttggagggggagagcacagttcaaccataatagcataccatgttttgatctttgagtgtattcctaaaattcattaaaattcctctttttctcttgtctaattttgatggctttggttttaagtatctttttttctcctttacagagaaaatgggctgggctttctattgggcaagaaatagaaggtaggtatattttttagccacctgataaagattttctatgtgattttctcacagttattgagatctgtacaattttctattactagtggtcagatcttaaacattcattgtatcagaagactggttacatctatgagaatgggaaggaaatagttatggtacctctgttcctatatcttttatgaagtgtgtgataaggtcgtcatagttcaaggcaaggaaagcaatttgtgacttccagttgggggcgtggcggggtggaaagactaagctgctaatagataataagccaaagaactaataagcaaaaagtggcattgtctcaggcaatgtggcaaagttaggaaatggagtatgagtcgtctttagtcagatgattttatgtcaacttcatggatacagtaggggaaggaaagaaaatgcaagtgtaattaaaccagcttttcttctgcttgtctttaaaacttaaaaaaaaattgtatttatagaaaggttgcaaaaataatacgaagaatttctgtatactgcctttacccagctttaccaattgtcatattttctttatcattctggctccctgtcttcctctctgggtctctgtctctctctgtacacacacacacacacacacacacacacacacacacacacatcttttatcctactcctcatttaggaacctgacaacttgtaattttttctaagttagatggaatttaaacattggggttattttattttattttatttttgagatggagtctcgctctgttgccaggctggagtgcagtggcgcaatctcggctcactgcaacctctgcctccagggttcaagcgattctcctgcctcagccttgcaagtaactgggactacaagcacttgccaccacacccggctaatttttgtatttttagaagagatggggtttcaccatgttggccaggctggtctcgatctcttgacctcgtgatccacctgccttgacctcccagagtggtgggattacagatgtgagccaccacgcccagccaacattggtgttatttttagttagctttttctttgtggaagtatgaacacttgttaaatttaatgagaaagtggggtagtatgtagcttaggtttctaattttcataaattaatttttctaaatatgaggctaagagtacttaaaactttgaatctagatattttctattgtgacaagatacagaaattcaagattataaattttgatgagttgagaaatgtgttttgcggtttaagttataaaagcattcttctgctaacagaaatgcttatctggattgtaaagtcagatctttaaagaagtggctcaaacagacttaataagcaaaattgtaaaacccagtgataggtgggactaaagtggagtaagcttgagggaaggtagggttttggggcccaagtgatgtggatgatgtagccataaagatagaaaactggtttggtttaagtagtgatgtagaccaagataggataggaggtgtggtttgaaggagtgctcaagtattctggaatgggagttccgtaaggtgaaacattttagtcaaatcagtgattttagtctgagggaatcttctggaggaatcatttagtcggtcttctttccatctggcaatgccatattttaagtgttacaggctaatgttttgaccactatatatacacctattattgtaaagtccaagtttattcaaagaactggatacacttattttttgcttataaaatctttcttattagtcttttatattaaattactattagccgtaaaataagaaaacattctcaatcttctttgatccaggatgaaatcttcaggactcttgtccctttgggactgaccatggtgctgactgtggtgctgcctgggatactgtccatggtgctgcccatagcacttgaaattgtaacagtttggtcttttctatttaggaacattggccttaaattaaaatgcatttgaaaactacagtcagtgcattactacagtcagtagtaattatatttttatttatttatttttgagatggaatctcgctctgtcgctgaggctggggtgcagtggcatgatctcagctccctgcaacctcctcctccccagttcaagcaattctgctgcctcagcctactgagtagctgggattagaggcatgtgccaccacacctggctaatttttgtatttttagtagagaaggggttttgccatgttggccaggctggtatcgaactcctgacctcaaatgatccacctacctcagccttccaaaatgctgggattacaggcatgagccaccacgcctggccaatattttaaatatacttattcaaatttctcagtatgaagatgacatgaatatatgtatatacacacatatatatgcattatgacattatgatattgttttggtgtctttaatgcacaaaatggtattatactgtacaaacctttctgcagtagacttttgtcactcaatattatgttttcaagggccatccacctttttttgagatggagttttgctcttgttgcccaggctggagtacagtggtgtgatcttggctcactacaacctctcctcccaggttcaagcaattctcctgcctcagccatctgagtagctgggattacaagcactcacccccacgctggctaatattttctatttttattagagatggggtttcaccatgttgaccaggctggtcttgaactcctgacctctggtgatccacccacctcagcctcccaaagtactgggattacaggtgtgagccaccacgcctggccaggccgtccatctttaataaatatacataaagttggtttttgtttttttgttttttttttgtttttttgacagggtctcacttggctggagtgcagtggtgcagtcgtggctcactgcagcctcagtacctggctaattttttaattttgtgtagagatagggtttcactgtgttgcccagtctggtctctaaatcttggacttaagtgatcttccctccttagcctcccaaagtgctgggattgcaggtgtgagccaccgtgcctggccaagttttaatttcaataaaaattgctgtaaagtattctacattatgaatatactacattttattcattgttctcctactgataaacatttttcaatgtttaagtactataaataatgctgcaatgaacctccctgtagatgtgttgttagacaaatgttctagcatctttctgggacagacatctagaaatggaattgctgaatcatcatattcatttttacattaatatttcaacctataaatgttttcaaactacatgagggaaacaactaagctcttttgcctatcaaagttactcagcatataacctgtactttctaggatttttttttttttttttttttgagacagagtttcactcttgttgcccaggctggagtgcaatggtgcgatcttggctcactgcagcctcgcctcccaggttcaagcgattctcctgcctcagcctcctgagtagctgggattacaggcatgcaccactgcgcccggctaattttgtagtttttagtagagacggggtttctccacgtttgtcaggctggtctcgaactcccgacctcaggtgatccgcccaactcagcctcccaaagtgctgggattacaggcatgagccaccgtgcctggccattctaggaaatgttaagaaggagcaagccatccagaattggagacaggagagtattctgaaacttttagccaaaatttgaacttattatttgatcttcagtgagttttatgttccttcctcaggctttgttattttgcttttgaagtagttaaaatatgtatatgtccccctttaaatacagaaatctgattatacaaacaatttcatttaaagagtttacagaaaatcggccgttcgtggtggctcacgcctgtaatcccagcactttgggaggccaaggcaggcagatcacttgaggtcaggagttcgagaccagcctggccaacatagtgaaatcctgtctctactaaaaatgcaaaaattcgctgggcatggtggtgtgcgtccgtaatcccagctacttgagaatctgaggcacgagaatcacttgaacccgggaggtggaggttgcggtgagttgagatcgtgccactgcactccagcctgggtgacagagcaagactctgtctcaaatataaaataagagtttacagaaaatccttgtacataactcaagggtctagaatttaagaaataagtttagaacagaatttagagtgtgaaacgaccataaagacttatctagttcagtcttgatttatagatgtgacaaatcaaggcacagacaacttaaattatttacttggattcttctgattgctagcagaatctgttgaaacacacatactcaaagtccctttgaagaaaacagctttgtttgtaaaccactagaatctttgcaacagacatttaatactgcacagtgacttcttttgtttacctcttgctatttgacctcagtaactcacagaaatgccatgcctgttgttcaaagcaagtgtgaaaaaacagtctttgtttataacctgcttttgtggtgagaactgtagaagctcacttacccaatgtgacttggactggtaattaagtgaaaagttggttaaaggctttttcttggaggtgtggtccatggattggagttctgtattatcttttgtgcatacactttacccgtaatttccaggtggatttctttgaaatggctggagaacttagactttgtagagcatctgagagtgccaaaacctcttggatttttgtagagttcactcccaaccttttctaattttaatgcttatacctagttagcagtattttttttttctagaagaaacacttcatttaaaaaattttcccaaagctttcaacttataatatctattctagaatgtcaaagtcattgtaataacagttcaacaaccaggccttcagaagtttttatactatttaattatatttcataattaactgtaacaagtgtaactagcacagacagataccagaatgaacttggttgacccatgatgtgtagcaactcctgtctacaagctctgagcgttaggcaaaccataggctgatgggtatatgttggagggataaaagttggtcagctttctgatgactcagctcagtggaggttgcttaagagagctgctactgtatccttaaggggccattggtaaattttaggacaagtatcttcagggaacctaaagggaaaataaattgtgtgtgtgtgtgtgtgtgtttgtgtgtgtgtgtgtgtgtgcgcgcgcgcgtgtgtgaagccttattgaagagtagcaatagactctttcttactaggcgtaatcaagttgccctcctggggaaactcaaatgcaaaaatcctcttgaacttttctgggtagcctactctactctttcctaatagtaccactacagtatacagcactgtaaaattttttgctttaaaagtttgtttataaactggcatttataagtatactttttgagctgatttaagaatcaagtttttttttctagggaaatgcttctttgtaattatctgtcactagcaaaatttgttttaacatatatttttctaaaaatatgatatgtaaactgtgttgtagttgtacaattaaaggtttttggtcgaacagttattacatgatgtaaaatcatgtgtaacactttaatattaattacattgtaacctaaaattcattttaaaactttttatgtggcttgaacaggaattttcttatccaaagctttgtatgtatgctttattgcctcctttgttattagcatggagaccatgggttttctgttattgttgtttcatttaaacagttcatgaatatattaagcacctgaaagaaactgttagatgctgttaataggaagaggagttaaaaacctcgtccttgcccttatctacatgtgtacatgtagaacttactgtagttccctagatgtagcaggtgctcaggaaacatttttgtagtagtaaaaaagaaatgtcaaactctaacttgctctggagcaaattccgctagtaaacattgtttttcaagcttcttttttttgccttgcgtcctactttcttaggccaaaataattcatccacatcccaccttagctgtttttttgtgtcaaacaaaaatcttatttggaaatagcatgttacgccaactgtgttggggcatcccatactgtattgcattaaatgaggagaaagatgcagaggccatgtggggaggattgtgatcctgataagagtgggatgagggataacaacagagagactgccgttcaatatttctttctttctttttttttgagacggagtctggctctgttgccctaggctggagtgcagtggcgtgatcttggctcactgcaagctccgcctgccaggttcacgccattcttctgcctcagcctcccaagaagctgggactacaggcgcccgccaccacgcccggctaattttttgtatttttagtagagacggggtttcactgtgttagccaggatggtctcaatctcctgacctcgtgatccgcccgcctcggcctcccagcgtgctgggattacaggagtgagccaccgcgcccggcctgccattcagtatttctaattaattcagatggggaagaaaatctctagtgactattattttttaaacctgtacctgtgtgtccctccagtgaaggccatttaaaccccatttttggtgaagtagtttatgattcatttatgtgaaacttttagttactagaaacactacaggtattttgtactcctgtgatttttaaaaaaatgcttctttttttcccctagtctccttatatacatttgacaaagccaaacagtgtattggcacaatgaccatcgagattgatttcctgcagaaaaaaagcattgactccaacccttatgacaccgacaagatggcagcagaatttattcagcaattcaacaaccaggccttctcagtgggacaacaggtagtttttaattttctttcattcctttaactttataggtattctaatttctgcagttttccaaaattaattccaccttttaaaaagtgagaggggctttgcgtatcaactcgtatatccaaggtgagtgataaaagtgagggagatgtatttactgaacttcaaggagtctgttcagaaaaattctaaagtagcttttagattaaaatgtcatgtataattatagcagcttttccctcagcaaatttgggaaccctgtggacatatatatctgaaattcctttttatatcataggacatttgttttgcctctggaatgtctgtctctttcactaatatagttctgtagaaaatgtagctcttggccagacatggtggctcatgcctgtaatcccaacactttgggagactgagttgggaggatcgtttgagcccaggagctcaagatcagcttgggcaacaaagtgagaccctgtctctacaaaaatttttttaaaagtagctgcgtgtagtggtctcaactactcaagaggctgaggtgggaggacggcttgagcctgggaggttgaggctgcagtgagccatgattgtgccacggcactccagcctgggtgacagatcgagattgtctcaaaaaaaaaaaaaaagttcttattttggttatgggcttatttgagaatcttaaaaaactgaattcctgctagataggaaaaggatatagtacattattttaaaaagagtactagaattggaatgaacctcaagagattaccttatgtaactccacatatacaaatgaggaattttatttttttattttttaaaattttatttatttattcatttattttttgagatggtgtgttaccctgtcatccaggctggagtgcagcggcaccatctcagctcactgcaacctccgctttctgggttcaagtgattttcctgcctctgcctcccgagtaactgggataacaggcatgcgccaccacacccgactaattttgtacttttagtagagatggggtttcaccatgttaatcaggctagtctcgaactcatgagctcaggtgatccatccgccttgacctcccaaagtgctgagattacaggcatgagccaccatgcccaaccatttttttttttgtatttttagtagagatggggttttgccatgttggccaggctggtcctgacctcaagtgatcctcccacctcggcctcccaaagtgctgggattacaggtgtgagccatcacgcctggccaaatgaggaatttaagatctaaagaaggtaaatggtatgcccatggctacacagctaagggacatagttgagataagaattaattaaacacatatttgatagtacctagtgcctagtaccagtcactgttttagacactgcagatcggcagtgaacaaaatagatatgatccctgctgtcatagaacttactttctagttgaagaaaacagaaaataagacaggaataccatgtacagttaggtctctgatgaaagtagatcaggacaattcaccagagagctattgcggtgctgttgtgtattggatgaccaaaattgtgctcagattgcctagctaaacttgatggtttttacctttgcttttagttttagtatcctaatagaaaatgtttaggagaatgtttaatagaaaatgctttggtatttataataatttaaaactcagtagcatgtagaagtcagtaaatccatgaaagagaatctttcgtaattcagagaagaagtaaatatcttactccagatcactgtccttaactgtttcttctcatttgtggtatctcgtagtagcagaatggacagacagcccaacctgtaatatttaccattataccccagcacatagaagaagaccaaacttttagaagggactcagcaaagatttggtgaatgagtaattgagcattcagaagctgtctctgcacttgtagggcaagcattttgtactagtgatagaaaagcaggaattgtagagtcacagacccagggttgacttctggcgctctcatttactgtgactttgagccttgttgcatagcctgtttctgcatctcagcttcctcactagtaaaatggagtcgtagtttctgcttccaagagtgtttgtgaatattatataactggctgtagtgtttgaataaaatactaagaaactttattctttgttagaaatagtaaatgtggtactcttgaattactttaggtggcactctgacatttaaattagatattttttatccatgtggaagaaattttaaacatgagttttgcagtcattttgtaaacactgatcgtaagtgctaattcccttttcttcattggctgtgagtagtttgtttgaggagcagattggagaggagtatataagataaactggttttctgcatttgaaaaacattggtgatgatctgaggatcaaactattatattatgaagtgatttttctccccttacctcttttctacatagcttgtctttagcttcaatgaaaagctttttggcttactggtgaaggacattgaagccatggatcctagcatcctgaagggagagcctgcgacagggaaaaggcagaaggtagcttttatttctgatcatctttactagatcatctttataatgtaatttgtgcagattgattataattttcctatctgttgcttagtgatttttttcatattgtgtacccttttaagatagtagggagaaaaaattgctttcatagccatcattgttattaaaatatagcttaaaatgtatttatttgcagacctaatattaatgtaaaatgtagacatatatgtacatataatttgcttgaatgcagatatttattgtaaataaataataagaaacgcattattggaaagatataggcatggaaataaggcatgtaagaattgtagaagaaagttatgagaaaagtaaaagtagctcagatgatagtctggaaggtttgctttgcccagagagacctcatttccccctcacttttggccttgctttgagaagtccagaagtttgctattagactactaattattgtctttctctacagattgaagtaggactggttgttggaaacagtcaagttgcatttgaaaaagcagaaaattcgtcacttaatcttattggtaagatttacagtttttagaagatttgaaatgaagtgggcctatttctatatgtaactcaactacagtgatttccaaatggggaaaggaaagaggggcatctctcttgagagagtttatcacagaagcatggggtatttcctgttggtcagtttgctgatgaaaacgtttaaaaccttcatctggatcaactttgtccaatagaaatagagtgtgagccacatgtgtaatttttaatttcctagaaattgcactaaaataagaaacaaattaattttttaacttttaattttgagataattttaggttcacagatttgcagaaatagctcagagaatttctgtatgccctttaccagcttaccctgatgttaatgtcttatttgacattttcaaaagtacaatgataagaaatgaacatggtttcatttctgctaactaaactacagattttattgagatttcaccagtttttccattgtgtccttttctgttccaagatctaatttaggatcccatattgcatttagttgttctgtcttttgagttttcttcagtcactgacagttcctcagactttgtcttttatgactttgagaactggtcagttattttgtagaatgcccctcacttggttttgtgttaaatgagatagcatcatcatttcttttagtgattaagtgatgaatgtgcaggtcaagtcttcccagcagattcatggttcagtcctactcttgtactctagcacaatttttgtcatattaaaacaattgcagcttattctctgagaatagtaactcaccagaataatgtgacattaactgggcattaattcttatttttggttgatttaactatgttgatgtctaccctactagagagtagagggttttcattggttgcacatcatcatgtccagggtcacttaacagtctttgagtgcgtggcctttatttcctggtccacaaattaccattcccccttattgttttttgttaattataaaatattttatttataaaatatggataggcattcgaaaacaattcacacactgtaaaatttggttctgttttcatagttttgtaatttgctttttttgcttagcatgtttcaaacatcttaaatatacacctataacatgatttttaatgcctgtatgtcattttatgaaggtaggatgtattttcctgttattgatctagtacatttatgaagtgatttctttgtattttatttttgtgtaccttttgttaagatatcccaagggagttgcataactttcataggtatttctaagtaatccatgggaaaaaaattgtgtagttaattggcattcagtaaattttgcccacaagagggcagtagagtgtaagaaaaaaatatttttcatcgctttccaaaggaaatcttaaggcctcaaaactctaaccataaaattatcatctagtataaacttttaaaaagcgttactttatttttaattgacagataataattgtatatatttatagggtacaatttgatattttaatacatgtatacattgtagaatgatcaaatcaggctaattaacatatcacctcaaatatttagcatttcttaggataaactttttttaatgtgacattttcttccctggttttataaaaaccatattattactttattttttgtttataatagagcatactaaggtacttaatttattctttgtttgaaatagtaaatgtggttctcttgagttgctttaggtggcactctgacatttaagttagataatttttgtcctcttgagaatttttaaacatgagttttgtaatcattgaagtctttaggatgatttcagacttttgtgtccaagtgaagagaaagcaaagaagacatcaaacttgttcagtatatttccttaggctgaggggttatatgcccaattacctgtataagcttaatctggataaatatatgtattttaaaataaacttgcgttaggagacttcagtgactgcgagatttcagttgcatttctgccagctagtgttgtcttcatcagatatggcatttcttctgatcaaccgagttagttaatttagttagattgaaggttaataaaactaagttttatggactgatacaaatagactacagcataagtttagctagtcattttgacagtgtgttaccatatatggagatcagacaaagtagatagcatagcaaaacttacccttctgactgtaaaatcagctaagattatattgttcgttttgtatatgtaagggtagcttttctttattcatttaggatgctcagggagttctgtctgtctttttagacttagtgataaagtccttgtttcacatttgataatattcgtttgacataggcaaagctaaaaccaaggaaaatcgccaatcaattatcaatcctgactggaactttgaaaaaatgggaataggaggtctagacaaggaattttcagatattttccgacgagcatttgcttcccgagtatttcctccagagattgtggagcagatgggtaagtttaaaaaggaaaatgttataaaatcttgtgttgttaaaaaaattaatgcaatgaagaatctcttttcaatagttttgaaattatttttcagacccattatttttgtctttttctttaaaaatgaacagataaattttctgaaaaactttataataccagaacttttaaaattacattttaattttatggggaaatcatagaaataagacttgtggtggctccattttgtttatttatttattgaagaatgcttttctatggggcatatttagaaacttcccctgacagtaataatactagtagtgactccattttatttatttatttgcgtaagaatgtttttctatagggcatatttagaaagttcacctgactctaaagatcactatgggtcagatgtaccctgctgaataataactatctattaggctgtgtgcattgttctgacattagctgccgttcctttttattgtactgttgcattacccagttagtacatcttcatacctaataaatgggtacttgcatatttttaaattaaataagtttgatccaaaaagacaaatgcaggatatacattggagtttctatattgcatacaaagaagtgcactattcgtttaccactttcttcttgaaggtttatttaatttatctgtgtgaagtgactttatttgcccagtggaaatgctgtcatgactgttttcatgtccatatcattcgttggattggaatgtgagcaacagaatatctgagaaaggaatgtataacataacagcttctggcagactattagtgtaaaaacagcatccaaaaaaaaatggaaggaatatgaatatattactccgctcatccccatcattctttatctttaaattgctactggaagataaaagtatatttattatagtggggataagaactgctttctaggcactaagtgcttggattgtattagccttctattgttggtagcctttctgcctggtcgctcactctgataaattacaggcacggcacacacctgttcactgagtaaaggtcgagtttggaattggattaagagaaaatgacagagaccctcatcacctgagttttatacaccttgaaatggcaatagcatactttttatctcaaagatacaaaggccacgtccattaaaagcagaattttaattgggaaaatattttaaaatgtggtagttcactatcttggtaatgtgtattttcgatcaagacatgaaaatattgtttaagtgtattttgggtaaaagcagggataaaaagatgattccaaatgttgtaagttattcttgtggaatgtttttactggttttcagaactgagatctagtgcaggaagagtctaatgattctgtttcttagaacatttatactgtttagccaaaaagtagaaaaataactgcattggtagtaagccgtctcttttaattataaatgttttctcactgtttggaagctattgaagataacagttattcagatactagtttgctatttgtgcattatctagatcctgcacttgaagctacgcgcaacgtcagtatgcgttgggtagataatgcgtaaaggagttggtctcacattggtcagtttgtgaccttgccagctgttggagagttttaaattaaatcagaacagatttggaatttgttagtgaatttcatctgtttctgatatccgtattgaaatgagctgaattacagtagtgtgctttttgttgtttttgatgtgttttttgactaagcactatggatttgaattttgtgagtgccactgtccagaaccttttttatggatttatttttctaatatttttacactaatttaattagacaaaaaatgaattctatccttttggaaaagttttttttttttttctctttatggctttttgccatcaggaagcatttgttaccaatttcattgaaaagacaaactagtataaagctgtcctggcttttgagctgaattgaaaaacttattttctttattctggatgaagtttctgggtatctaaaaaaaagtaaagcttcttcttttttttttttttaatggttaaatggctgagaaataattcttttgtaatgcatgtataattccctgtcttccaatagaggcttcttttttcctttgaattttgggggaattatatagtaaaatcctttcttgcactccaattacagtgtggttataaagttctccttaggctttggtaaaggtatataaataaaaatggttatattttgacagaatataaataaaattatacaaattatttttatgcatattctgtgttgtttttttttttgacatgtcaggtgggaacaacatggatttttttcccccactctttgttaactaaatagacagatctatatggtttggggattcagctggacactgagtatgactggttaaatcagttctaatttttaaaaaagattagaaaagaataatttatgtaggttatggggcttttttgttttaagcagaaaactttacttttggcttgagaccaaattactgtctttaccatggagtctaaagtgatgtctacttcgtaaacaggaatcttaactaagtggattttttgcctatatatcaattttcaaatttacaaagtgataaatttagaatattcttctcttctgtcattatgttcatcagactgataattatgcttctaggtaacagagttctttctttttgtctataaaacttcatgttgccttttcaaaattgaaaaatatagtttagctacgaacagaatgttgctgatgagatataggaggactaaaggacttaacgagaggcacacaattaagcagtaaaattagggaaccaatgaggtaatatacttgaaaataactgtcatggagtttccaatctgttagtttctctcttgaaggtctttcaaataggtagtgtataccttaggccgggtgcggtggctcactcctgtaatcccagcacttagggaagccgaggtgggcggatcatgaggtcaggagatcgagaccatcctggctaacacggtgaaaccctgtctctactaaaaacagaaaaaattagccgggcgtggtcgcgggcgcttgtagtcccggctcctcgggaggctgaggcaggaggatgtgtgaacccgggaggcggagcttgcagtgagccgagatcgcaccactgcactccagcctgggcgacagagcgagactccatctcaaaaaaaaaaaaaaaaaaaaaaaaaaaaaaaaaaaaaagaagaagataatgtatgcctttctgcttttgtagttttgttatatttttgtagaattaaaatcaaggaaacccttaaaggagaaaggaagtcacataaagctctctagactgagggataaaggaaaagggattatttaggggaatatcaatttagacttttgtttttgttattgttttaatcagagtaactgttgagttttccccttgtctgaagcagttgagctcacccaaacccaagtggggcagcccttccttggaaggatatgagagcaacgagcgaagaaaactaaacctataccttgcacttagtaaataccaaatagatatttagttagaatgccttccaaccccccacaaaacagatttttaattaagaattaccttaaatccataattttatgggctaatagaagccacatttgagtcccagggtagaaatgtgaacatcaaagctggtatctggaagtatgggtgaataaattcaacagctgattgctgtctttcagcatattcaggtgttaactgaatagatactgaatacttgtgttcggacatttaccacacttattcccctgtatgcagttttgtggacagtgttcaggataaataaatgattgattacctcagttctcactgtagctattttgttagcaaagatagcgtttctgccaagaaacttcattttttcagcatccctggcaattctctctaaattataaatgtcaaagcaaaaaaacacatcgttttcaatgaacagtggaataattgttaaagaattagtcagcatctcttaatgtaatcctgggaataggttcacatctacccaaggaaagacctagaaggaaaaggatgtaaagagggaagacctcagcctcacactgtctttcagtggatctgtggggtgtagatgttcaggccacctagtggggaggaaagccacttgttatggtcttgtgcccccattctttgaaactgacactgtgttctttttggtctcctttccccagtgtctccctctgtaagcccattttcaatcgtatttttaaggtttcttttgaaattcaagaggaaagcaactcttttctgatatcataagtgaaattgtagttactctatgaaacagaactgctgagaagataaggaacctttcaatcacacagacatctttcacatactaaaaacagtgcaaataaaacatagtggaagaaagggcactaaggttttgtgcatgccatattttggagagagggagttcttgctaagattaacataaacactgacactcttaaaatgcattttcacacccccactcatgaggagagattgcattttaaatgggggttaagacatccaggcgaactccagggctctgtaaaaggaaccctaaggctaaagagcttatctgaaatttgaaaaaaagaaaaaaaaatgaagccttctgacattcatctttttttcttgtattagtcataacttgcttttcagctatattttaggttttgaatgccaacctgacatctgttcaagtctgcctgtaatttattagcagaggaaaagacagcagttgctcactagttagagatgcaaaatttctgccttcctgttctccactaagtacttatagatgatacctggatacgaagaatgtaataatttactgaaaacttcaggtcaggaaatttataaagatttttttttaattagaagaataaaatggcttaagaccatgtgatttcaaaaatctctagatcaggatttagagacaaaacatagaccctaaaaaatactttagataactttctataaattgtaatttttttaaccttgaattaatttttccattggttttaaatttttaagttaaatgtatatttgaacagcagttgtgcttatatctgaaagtcaaactgtatgtaaattcacctggcattttgcatttatagacagactttaagaaacaaatcttttggagaggtagtgctgtctacagagtcaccaaatggattagatttcctggcaactacagttgagttacttacagatcaacagttgggtcactacaaagttgagatctaagtgttaacctgagtgcccaccagtaagaaaccggttagaggcaatcttaaaatgatatagctccaaatgtagagacatgtttgtgttaataaaaaatatataaaagcaaatgcattctaaaaatctctaaggacatacattaaattgaaaaaaggtttatggctgaatgtggtggctcacacctgtaatcctagcactttgggaggctgagatgggaggatcacttgagctcaggagttcaagaccagtctgggcagcatagtgagaccttgtctcatttatttatttttttaatttaaaaatttaatttaaaaattaaaaaaagtgtttacttccatggaagggaagctaagatggggaataaagggaaagttttgttcttttactcaattttacctttatgtctgaatgttttattgtatttctaatgtgtgattttaaaagccaacagacaaaagataatatcacagtatgtttcttggggtgactctaccatcagcatggaaagtcagcaggaaacaggtacatccttccgccttcatgaagttttctgtggaggaggagagtgcagggtaaaaggcctggattccaagggctttgctggcagccccttagagggtagacagaacacctatcctatttggtcaagaagagaaaaagtttctccatatataacaaactgctttcccccagaatgttctgcattatagtaatggtgtaagtagtctgcccttcaaacatgagaacatttgcatccaggcctttaggcagccaaggcagcattaaagaagaaagagtgggagcagagcaagctgagggagagcagagcttctgacatttgaggaactgggcgtgaatttgtttttagtcttcaaaaaccattctcttgaggaatcgaattcccatgactcctgaagtgaagcggttggtgttttctcccgcgttactcccatacgtaagttggtgattataatgagggtggtggctaatacttatataatgccagacgctgttctgtgtgctttattattgtgtttattaatcctcacaacaaccttcagaagtagacactgtattgtctccatattatggagcaggaatctctgtctcaaaaaggtgaagtaatgggtccaagacacacagctagtaagtagtagagtcagatttgaacccaggcagtcgagccccagatttcatttccttaaccattacatgttattctcccatgaaagcccatcgtgtaaaaccattttaatgggctttctagcttcacttttttggggacctttgaagcaatcattgaggcagcctttgttctagccaagggccaaccatggcaccattgagattttgagctgtataattatttggtctggggactgggtgtcctttgcattgtaaataactaacttttctagtaatctgatgtgttcaaattgtcatgagctcaagagacatgaagatttggtggtaggctgtaatacctaatgccacttttttcatgtgttttttgtcacgtgttgtagcagaatacaggaaggaaggaactggaatgggtgtgtcagagaagctgtcttaaactgtcaacctggagagggaacataaatgttaaaattaaataatcattaaaaaattaagcaacgtaacaagtgatatcaaaggccagtatttgattaagtgccagatgagcagtacaattgataagccctacaggaactgaaagggaatcacatcgagaagacttcatagaagaggcagagcttgagtaaggccttaaatgctgagcggttttggataggaggagggaaggggatagttgtccatatcctgggaagagtgacagactaaacacggtatagacttcatgacttagaccagtctaacagagctgttgtttggaagaaacaggaaataggattaaaaagttagttttgggttgggttgtggaaatctgtgaggagatgtggactctttttaaagtactgtccctgtttaagcttccagacagactcagaaccttccagacagactcaggtgcttctcctgtgtttccctgcaccttgtatatacttagaatccagctgtgttcttaatgtaattattcatttgcattacactcctaaggcagaatttcttaaccttggcactattgacattttaggctggataattcttagttgtagggcgcctgacctgtgcatcataggatgttaagcgccatccctggcctctacttgatgtcagtacttcccttcctcaccactccgagccccagtgacgattaaaagaaatgtgatgaaactgtcctgtgttgagaaccattgctcaaaggcctttgaaggcacaactgtaatgtcttcttatccatgtattatcaacatcaggggtgttgggatgtaggttgcaggtcattgttggaccatgaaccactgttaccagtccacaataagacaaatattggaaattaagaataagtaattacaaatgtttatagcaatttgacattatcacaatttttttaaaattatattttacaaaaatgttggtctgcaatggattggaaatttaaaaggaaaaaaaatacagctggaccttagcatacatagtttgagaagcactggcctatgtaaatatttgcaaaatgaatgaaattttttgaacagatgccttagagaaaaggtgaggcgaatagtcttagagaccagtagactattgctgtccagtgtgtggtacttagaatctggattggggtgaaggcaacaggaatggaatgggaagaaaatacatgaaaaaattgcagacatgaaactggcagaatttggcaatagttattgtgggtgacagaattggaggtgagactcaggtcttgtgagaaaatgttggaaatgagaaactcaggagaacatagttttggaaaagtagagaatatcattgcacatattttcaatatcgtgaaaggaaactggaagctgaactgaagagaggaagaattactggcatttcaatttattgaagcctagcttcaatcagtctgcacgtgtttaggaaacacactgttgactacttttgcttgaaataccctctttacttggcttttctcactccaagcatttctggttttccttttacctctctggctgtctcttttcaacctcttttgtgtcccttaaaatgttggggttcctcaggagtctgtctttgacctattatttttctctaattattctcctccaaattaatcacatctgtttcatagcttcaattagtatctttatgctgctaactctcaaatatgcatatgccacctcggtctcagtttagaactctggatttgtaccagcataatgtgttgggtatttcatgatcacatagtaagcttgaaattaaacacattcagttgccccctcagtcctctctaaacatgcatctatatctgtgttttctatctctggcaatactctagccaaaaatctggacacctttaactcctctctttccctcacctcccacttccagtaagtcgcagaatagaccgtcaattctgcaatctccgcaatctctctgaaatccctccagttctctctacctcgccctgccactcttccttcaggacaccattatctcttgcctgaattgctccataagccctcagccttgcccttctctaatccattctccacactgtaactggagtgatttttataaaaaggcaagtctgatcctgtcactgcactggttcaaactctttagcagcccgccttaactccttacatggtttacaagccctgtgtgatctggctcctgctaaactttcttgcttcgcctctcagcccgtgcccctcccccatactctgggttccagccagcctgtgctattttcagttcctctaatttgccatgctactttctcttacctctatatcctagggttatttttttttgctttttttttttcttaaccatcttttcatccaattcctgttcactcttcaggccaaagctttgaactcactgtttctagaatgagtaggctttaatgttcctcatgtgtgttctaatagctccatgttattttatgcattattacattgtattataattgcttattacatgtctgtattccaagtcctctctccatgtccctgccctcacaaacatagtataccttcagtaaggaataggccttgtttattttggtcactgtcgtattctctcctcccggcatggtgtctggcttataagttttcaggaaataaataaatgccaggaacttgattaatcttgattaattaaatagaacacttagacagtttgatccaagccctgccctcatgatacttacagtctgtgtgggagtaacactgtatttgcacatcccaaagcagtactgtgtaaaacataaggtgcattgtgaaccagattagcaaagtaggccacatggagaagcagcagatgcatttaaagagcaagactgagccatatctttaaaagtcaaagcagatatgatgtttataattcattactaaatccatgtagatcctcttagattctgaatttaggaaagacctcttggattggtcctgaatggcactaggctccagaaataagaaaaggaagagtattttcttgggtacttgtgagctaccatttgcttcattgggaactgccattcttatgtaagggcactataacaagagtgttcacatttaagggcatcaggtcaatattgcgtctgtgtgagtttgtgtgcatgtgaatgcacacatgtattttctatttttaaatagaaacacattataaaaataatgcatcctcataaaacagcacagatagagtaaaaagtgaaatctcccttcattctacccactccagttttactccctctcttagaggtagacactgtaaagagattggtatgaatttttcaaaccctttcctaagtatttatacaataatatataatcaatccattcattcatttattgagacagggtcttgctctgttgcccaggctggagtgcagtggtgcaatcatactccgttgcagcctcgcactcctgggctcaagtagtcctcccacctccacctgccaagtagctgggactacacccagctaatttgtgtgtgtgtgtgtgtgtgtgtgtgtgtgtgtgtgtgtgtgtttgtgtagaattggagtctcactatgttgctcaggctggtctcagactcctggcctcaagcagtcctcccgcctcagcctcccaaaatgctgggataacaggcatcagccactgtgcctgacttttttttttttttcaacctagtagtgtatcttgggtttttttctgtgataaagcacacagataacattttattttttaaaaagttaaatagtattagcagatctgcatccacacaagtcccgtcatggtaagttagcgtctcttcctcagcagtaagaaggctcctaggcacacaccagaacaaggttggcattgcgtctcctttctactcacttgtatggccctaggcttctcaatgcggcagggccctgggcgctcagctacttgagccttggtacccttgcctgaaaaattgtttattggtaggtaacattaatgtgtgtaagttttctaacacagtacctggctgactgtcaaacactccatggatgatagttacttggtatgattatattgccaagaggcacttttggagctctgtaaaaggcaaaaatttataacccaatccctttaatctaatgttaagatgtgttttcttcttatcttaaattttgttgctgttgaaaatagttaacacctgagattttcctcctatgctgttttataattacccattttgaacagtgtttgttgataaggtagtcaaggggacacttcgaaatattttttctttatttgtgaagtcatactttggctgatttatatttaatttttatcacattacatcggagaggagcagataaattttctatcacctctataaattttctatcacatataagaaagtgtatcttatatgtgatacactaacttggaaaaacaacagctatcttgatagacacaatagagaataggatgtcagaggaagagaagaattagaatgttaacaataatgctagtaaaaagctacccaggacttaaatggtattatttgagagtacttctaccatgattcaaataagacttgccttggaattccatatgatttgttacttagagcagtctacctttaatatgtttaatatggtcatactttaaaaaaaaaaacctgcaagaaacttgggtttcacgtttttgctttttaaagaattaacataatgttatttcaggtttgtaaaggaagttacagaagatagcaataaatcccttccatataccattttagtcatagtgcaaaattaggcattgaaaattattatgggtactgtattagatattcaaagatttatttgtggctttgacttctttaccaacacctctggctttaatacagtatcttttatcagagcaagtaatagtttgaatccttttcttacaaatcctctttttactcaagtgactgcaaacttataaagatgcacacatctgtagcttgaacgtctatgctatttgctcaagtatttacttgaatttatcctcgatgatatgatttttttaagtgctttgattttaaattctatctagaatcccatcatgagggagaaatcttagcaagacttaagcaccttttcataatgactggttactgtaggataaacctataattagtatattgctaatccacacgttagatatatcccatcaaatttcaaatatacacaggagaattatccacattgaaggttattagtgcattccagggacatttccatgttgattcacaactacccctttaccttacactttcctgtgttactagacgtctctttctgtaaaacttctctttgttgttactttttacttttgtatgtgttacctgattactttggcttcctctgtgactactgagggagccaattgtggctgtgatgagcttagagaaagggagatggggaagactcgcttaaatgagttacaaattctctgtagtctgatctttatctggctattgcagtatgaccatgggtgatactaaatgaaatagaactcaactccccaaaatttggatttgtcttataagtcgtaatggctccaggtgggatactgtgtcagaccaaggataggcagatgatagtttattgccacagtcaaaagatcgaacccttttttttcatgttatctagaaatgaatctttaaaaaaaaaaaaaaggaatgggttgaacttataatattttagcaactcataaaataacttgaagaaaaagatcatttggaaggagagacaaaacagactgaaagacattgtttaaatttatgacttttattatcttacttgaatgctatttttgcccctctcgctattattaaaccctttgcttcctgttttcagttgctcctgtcaaggtatgaatttttctttggatgattgtcatctatttcatattatctagtattcctctctattatgagaaaatcaaaagtagacagtgtatctatagctatagatttaaatgcactaaggtaattatatatttgaatcagagacctaaggaataatctagtgtagcatttaccaaatttatttaaacttaacatgcttacatgaagacagacctatttatgtttccaaggaacaccagtttgagaaatgctgatcttacctgtgtcattcttattttgtagatgaggacattgggacctcagaagaataaggcaacttatttaggctaaagtcactgcttgtctactggggctggaatccaggttgcttagtctggtgccctttaggcttcatgattcagccacttaagacaatttgatttattgttgggctttttaattctagatttcataacttggatatgaaactgtacttcccagtctccaaaataagcttcactgttttctggaacgtgaattagattcagaaagccccttactgcctttagattattgcagcctccccagtgggccccagggatccaggaaaaatatctttgtttttcacctagtcctctcctcagcttttagagggactcttagatctatgtttatgaaaagacttttattagttcttatagttgtagtaatgcatgtttattgtagaaaatttcaaaaatgtagatgaataagaagaataaaacaatcactcagtgtaaaaaacaaaaaaccctgaaaaagtaccattaatattctggagtatatcatccagctagttttagctgtatatacatagagccaaaaaaaaaaaaaaaagcattttgctgttttataactggttttctccccactcagtaagttaacagtttttcttaaatattctctacaacattctttattttgtagaatgataatgctgtggtttgtttaatcaatcccctctagttagaaattgtattcagttttttactattatacactatgtttaacaagcaccttagaaactaaatatttctacacattcatatttctttaagataaattcctggaagtagaattgctgaatcaaaaaggattcacaagtgtaaatgtttttgacatgcactgccaaatttagacttcctttttgaaaagtcaaatgttaaggagatcaaagcaatcactaagcaggtactctggaagagaaatagaaatataaaaaatataatggtttcatgagaaactaatagacaaggttcaagagacttggagtctagttttggatttgtcattgaatggctgtgacttttgggtcttagtttcctcattataaaaatgggaagatagactagaaatagaaactttttcagaatagtcaccttatgaatgttgtttcagtgaaatataaaggtctgtacataagttctgcagggaagatgccatgtatttgctcattcttcaagtttcagcttgattgcctttggaaggtctgtcacacttaacgtcctcctaatagaagtaattgttttactttttggctcctcatagccctttttaaatgttggttctgtatagttgtatctttgatttttaatattgaggtatttgtaacagaggttatcttactcatctcctgaaagcacttggcttagcatagttcttgggtatataatagagactcagtaagtatctgtggaagttgagagtgataccttgttccccagtgtataacagcaaagcctagcctcctcctgttgagcattgtctgttctcgctttgaagagctcaccacatttcttcagtttgtttttgtttttattttattttattttattttttttttttttggcggggtggggtctttcctattcagtaacacagtggttctcagtctttggtgtgtatcagaatttttttttttttttagagttttgctctgttacccaggctggagtgcagtcgtgtgatctcagctcactgcaacctctgcctcccaggttcaagcgattcttgtgcctcagcctcccgagtagttgggattacaggcacatgccaccatgcctggctaatttttgtatttttagtagagacagggtttcatcatgttagccaggctgcccttgaactcctgaccttaagcgatccacccaccttttctggtattacaggtgtgagccaccctgcctggcccagaatttttaatgttaaaaaaaatacagatttccaggctctcaagtacactgaatgtgagtgtcaggcacaaagccgagacacagcgctgtcaatagctgagctctccttggggttttagctttgtcaggcaaattgatattcaagttccaggtctgccacttaccagatgtgtcttccccttaccaggggaaggtcactttaccactgtaagcctcagtacctcttccttaaaaagagggtaaaaataataccttagctcatagttttaaaaatgattacgtaagagaacatattaaaacacgtagtatagcccttcccatatctgcagttctggccttgatctgtaacttcttggatcttatatgcatttattatttatttgtttctttttaaaataacatttatattttttcaacttttagaggttaatatgttcattatagaaaactgaaaaacacaagaggcatataactaaaaaatcatccataacagaatcagtttacattctgatgtatctttccagtccttgtatgtgtatacatatatacataactgagtatacctttttacatggttacacttatatagtatgtgccatgctttcttgcatatcatgagtacttgagtatcaaaatactcagggctttaggattcagacattggtaaatattcacgatacattttcttatcttttgtggggacaaaaatatcttaaaaaacaaaatggcaacaggtctctggaaatgcatattggcaggtttatagttaaatactgtgttcacttaatacccaatataaaatgagatacaaagcagtcaagtaagtataatgcttcttagatagttcagtatgagatctgcactattaaaatattaccagaaatgatgtttctacttaattatttaacaattcatatagtattcacaaagtataccaagaaaaaagcacacatatgtcagtggttataatcagattgtaaatatggacatatctatatatatctcttcccttacctttctttctgccccttccttagcaatccagtacgtactgatgtatactgctcataggtggtttaacattgccatttccaagatgcttcttttctaatgaaattaatttactatctagttaattcactagctctattttatacattgtcacctcataacatctagaaagcttagtgttgtgaagtaaggactgataaacagaggcactttactaaaaaatcacttcctagaactgcggctacaatatgaaactatcttctagatatgaacatacttgcaaagaaccttccttttgcctttcttcttccttcttcagctcaatgaataagtacagaaatgcatatagctctacgagatgggttaacaacagtcactcccagacaacaagccttgctaaaaactctaacaagaggacatttatcaaagaattattttacttcttaaactttcagcatactttgggcacttctcagcattggggccttgtttgtcctttgcatactcaacaatgctaagtaaatgcacttgcagaacgacgagtagataatctgcatttatctcaaaacacactggcacagaactcttccaccgtcacttcctgtctctcccacctcctttactacccaatgagcaaagaatatgtagctcaaagagataaaagtttaacagttccattctaaagacagtcattcctgttaattgacataaacttacttaaagtgtgttattttgtgaagactacatgtttcaaacgtctactgtataatgatagcattgattaaattgtgtgcatataacaaaggctataatctgaaagtatcttcgaaatatgaatattatagccaagtacacttcaccttctcacttccttcttatcattatcagcccaaaggacaatatcagcgttccaaaagttgttttcagaagatagtcttacctatgaagttttcgggcatacaagaaaagtatataatatgttttagttcatcatctcttcttttgtcaaacattagcaacctctttatcatctagacaacaagatgtaaaattaggacttgcttgttcattgtacagataaccctcaatgggttatgtctcagcaaacccatcgtaagttgaaaatatcctaagttgagagtgcatttttgacttacagtattttcagttgactatgggtttatcttgtcgtaactgattgtaaatcgaagagcattaccaaatgcatattgcttttataccatcataaagtaaaaaaaattgttaaaagtcaaaccagtttaagtcggggaccatgtgtatacactatgtgcacagcaaagtaaaataaaatgcacagaacatgcaggtaatcttgcctaactacaaacacatggtatagaaccctttattccttcctacacttcctttgccttcctcctccctcagtccacaagcacagatctgtaccactcaaagaggaggtctaataatcccatttccgaaagacagtatttcattaaatttattaattccttttatccaggcatttagtggtcatttttagatgacctttaccacatatcttcagatgctttcaccgtccgccataagaatttttactgaaatgaattcttgaaatgtttaaaactttgttacattctttctcgttccacaagtagttatcccttcccagttacctttcttttttaggtctgtggagtcatgatacatctatccccttttcctttgtttttcatgcatttgtcaaatttattattgaatactcctaaattttttctgcctttatcatttgttttttctttttcattgctttagtcagttacccttgcactacagcagtagcctctttattatcttccttgcctttagtcttcttcctttccatcctggaatatttatttcagagcttactgtacaaaaataccagattctatcagagaacattaaaggaatcacagaatctcagtattgcaaaggatcttagccatctagtgcacacacctgttttttatttgaatctcttctacatttctttttattattattattattattattattattatttttgagatggagtctcactctaatgcccaggctggagtgcagtggtatgatcttggctcaccgcaacctctgcccccctggttcaagagattctcctgcctcagcctcccaagtagctaggattacaggcgtgcaccaccatgcctagctaattttttgtttgtttgattgtttgtttgtttgttttgagatggagtctggctctgtcgcccaggccggagtgcagtggcatgatctcggctcactgcaagctccgcctcccgggttcacgccattctcctgcttcagcctccctagtagctgggactacaggcgcccgccactatgcctggctaattttttgtatttttagtagagacggggtttcactgtattagccaggatggttttgatctcctgaccttgtgatccgcccgccttggcctcccaaagtgttgggattacaggtgtgagccaccgtgcctggccttttgtatttttagtagagacgaggtttcaccatgttgcccaggctggtctcgaactcctgaggtcaggtgatccacccgcctcagcctcccaaagtgttgggattacaggcatgagccaccgtgcctggccttttgtatttttagtagagatgaggtttcaccatgttgcccaggctggtctcgaactcctgaggtcaggtgatccacccgcctcggcctcccaaagtgttgggattacaggcgtgagccaccgtgcctagccttttgtatttttagtagagacgaggtttcaccacgttgcccaggctggtctcgaactcctgacgtcaggcgatgcacccgcttcggcctcccaaagtgctgggattactcatgcctggccctcttctgcatttctgctgagtaacttctgccaggttccttaggctaagcttaagttcctccagtgacaggaatctcactccctcctaaggctacattcctcttttggacaactataggtttaagtttagtcttccttatgttaaggtaagatgtatttgcttgtatcttctcctacaagctctggttcttcccctgaaactacacagaacaagcatgatactacttctttatgaacactctttaggtatgaagaaagctattgtccagacttccctgcagattcctcttttctctaagctaattctcctaagcttggttggttttttctagccagtctttttagccctttaccatcctattcacgtttctgtgaactttaacatttatgtatattaatgttaagctgtgaaacctagaatttagtggagtaatgcaaatgtggtctctgttgtaaaatagatcagaactatttattctttatttaaaacactagtcctttaatgtaggccgaaattgtgctaacatttttgacatcgacattctatcttaatgcttatctaatttactaatgaatgaaattcccagtcatctctcacaaaactgtatctcccccagctgtactcaagtacagaaaacatctattcttgataacttttatcttgttagaatagctcttttctcttctatagctacaacttgtcagtgtgtccttatcagcttatgatttaattgaggctatagaacatatacacttaaaaaaaataagctaagaactcttagaataaaacaacataatgtattgtcagttgtaaccatgaatgatgtttttcaaagtgtgtcctctggcctacattagagttacttagggcgcttgttaaatattcagtttcactccagacttaatgaattcagatttctaggagtgatgtctggaaatctgcattttaacaagctccattggacattggtgcatattaaaggttgacagctgctactctaagtactgaaggattgagcccaaagatatgatcagaattaggtggcattaataaaggaggtgatttctggggacagaagaacatgaactgttagagtaggtagaaattccaggtgtagtaaagaagaaataaattgtctgctagggaagatatttgctaggctgaattaggggcccaatagaacagcacataaaaggagttaaaagctaagggacggaaggaaaaaaaacaaagaaagaaaaaactataaaattctgaaaccagtaaagatacatgctgccatttggcagcaaggcagacctgctatagaagaagcatgatctttgtcatcaagaattcatgaaataccaggcaacaccctatgagggaatgtaaaagggtgggggtgtcagcaaagattagtttggagcattgctacacacatctcatctttagttctaggctatctaatgagaaaatctatattaaatctaagttgactgatttggatatagaccagtcggatggtagacagcttgcacagctgcttggtgctcaggaaataggctgttttcactagcatagcaaaactcagagtgctcttggcattttgaagttggtgggacaacagcaagtctctaccagacagaatagtgccacgaaaatggatggtcaaagtcccgactgcccagatggtatcaggagtagtggtcttggtcttaagtatttccatttcttaaagatttcataagtgcacagataaacaagtgtagatgacaacctattttagatgttgattgagagtcttaaggccaggcgtggtggctcacacctgtaatcccagcactttggaggtcgaggaggctgatcacttgagcccaggagtttgagaccagcctgggcaacatggtgaaaccccatctctacaaaagaatacaaaatcagccaggcatggtggcatgcacctgtgatcccagctactcgggaggctgaggcggcaggatggcttgagcctgggaaatggagattgcagtgagctgagatagtgccactgccctccaaagcctgggcaacagagtgagaccctgtctcaaaaaaaaaaaaggtttttgaaacaaaaggccctcctatataatgagtcaatgaaagttatgctcttagagtaaataattatattgtactactgaaatggtaagtcaagtagaactaagaaaatactcatgactctagttccaatttacaattttcaacagaaccataagagaagttgtaattatggaaacttaaatgatcaaatattaatttgtgtccaggcgcagtggttcacacctgtaatcccagcactttgggaggctgaaatgggtggatcacctaaggtcaggagttcaagactagcctggccaacatggtgaaaccccatctctactaaaaatacaaaaattagctgggcatggtggcacctgtaatcccagctactcaggaggctgaggcaggagaattgctagaacctgggagacggaggttgcagtgagccgagattgtgccactgcactccagcctgagcaagactctgtctgaaaaaaatataataataataattatgattatatttaaaagatcaaatattaatttgtgattatattttctacaagggcatgcactatttaaaattgagcactcaaatctggtttgcacaactgcacagagaagcttgcaagactgccgaatatgtcctgacttgctactagtcttttgatagcctccttctttggcaaacatggctagtctgcatttgtactggaagccacttgggattcctctttaaacatcagtcattgttcaaaacccacttcgcacttctttctctctttatagatcatgttgcccccaaaatgaactgaacactcttatcttaatgctaatttgacagagaccacttctaatttattatcatcctgcttactcttatataaaattagtgtttgctatagttttttctccctttgaatacctcaaagttgactgacagtttttcctcaacgcagcttgcctctgataacatccagaaaaaatgaagaaaatatactgctttgtaaaatagaagagcttaacaagtacaaatttgtcacttttttcgggtgtttcgaaagagtgtaaacagtaaacattgctgtttatttcttgtgtttcagaagtaaggctatgtatttttatcgagctatttacaatttacatataagatgtaagtattttcatgaatcattttcatcagtggggtggatatacctatcatagcggatacggtcctattctgacttttagatcagaaatcactttcagttatttgtagcacacaccttaaagcctattaaagttctccccaccaaaatttgtattattataatcactggatgtcaacacctgtggctcaaacagtatccaaattttgtatattgttggaggattgctgatttaactgagagttgtagctagaaataaggtgagaaagaatatacaggtaatactaatccacctcaaactaagaagcaaaggatggtggatgggctatgttgatctagcgttgcaaaaacacttttggatgaagtgcccagaaatagccccagttcctttcactagaatcagcttgtcccaggtgaatgccggcagagcagggtgtgtgctccccaagaaagggcagtgaccgctttccaatgtctggcagttaggggccatgagagtagttgcaattggcaagataaaggggaactttggaaaataaatatacttatgatagaggaggcaggagaaaaggtcaagggctgtacacatgtggaactgataatcatggtagcttggcttctatgaatgggtacatgttgacccttaagtgagcttagaaagcttgagaaatcagtatgcgtgaactgtttgaggcataagaaaggcaggattttaaaactttttttttaatttgtgcaaatttatgggatacatgagaaattttttacatgtatgtaatatgtagtgatcaagtcatggtattcaagggatctgtcaccccagtacaatatattcttattaagtatagtcatcctaccctgctatcaaacattgaatttattcctcctatcttactgtacgtttgtacctttagcctacttctccttagcctcccttcatccccagtcaccctccccagtctctgttgtctacttttccactctctacctccatgtgttcaaattttttacctcctacatatacgtgagaacatctgatttttgtatttttgtgtttggcttatttcatgtaagataatgatctccacttccatccatgtagctgcaaatgacataatttcattgtttttatggatgaattgtattccattgtgtagaagcaggcagaattgactctgatagtagtctagctggaagagaggctatagctacaaagaatcttgacttaccaaaacactagtaacatgtctgtgaaactgctgtagtctaactcatttactactatgttaatttggagcgtgaagttcatcagtggaatgggtactataatttgcgaagttcaagtgacaattctggtagataaagttttaaggagcagatggtcacaactgtcagtctcagaagtaatttggtaagtaaaatagtcatttatttggaagttttttggtaacctaattgtgatctaattgtcaccagttgggagtctaattccattttcatcactcatctgcagaaaggtgagagaaataagctattaattaatagccaatatttacgagctcttactatccaccataaagtatgctaagtgctttatgtgcattatacttaattatagtaactttctgaggtagttactattattatttccagctagttagtggaagaaccaggatttgaatccaggcaaactgactgcagagccctcacttttaacactacacataaaactgagtttatttaacagaaaacactgtcctttaacctgagattgtgtctacctttcaatactaaaatgtactttttatatgaaatggtggtgatagatgatgtcaggtttgattttcttttttttttttttttttaagaaatctttaccttgcaaaactaaaactaaaacaacccaatgacagcactgctctccagtttaaagaaaacaaacgttcttttgctagttgtgaaatctaaatttgagaaccactgactagaaaagtgggactcttagtaatttttaaagttctttagagatttttcacctgatttattttctgatttcaacctccttgttttcattaaccttttccttaagtccacctcagccactcattcttcgattatacacaagactttgtttgccattaccagcaaccacaccactttggggatctcagatgtaagcatcttgctctcgcgctgcctcccatttttccttgcttactcctagcatttctcctgttaccaactccagcaacttggaccccactggaacctccagtataatttattctatcagttcccaatctttttgttctctctctcctctttccccagcttaacctccatggtctatcacatatatcctctttgtatacacccttagcagccttgctcctcatcttctgttgtcaaatccacaagtgtttctcagctacctgcctactctgtgccagtattctcgctgttaagcatggcttaagaaaaacacaaaaccacagtgtctgatctcactttaaatttatgaaccaaatctcaagtgagccctcagtatttcttggaacagatattcctagtattccttctgtatttccctagtccaatccatttattctcctattctctgagatgactagttcttcttctctatttggctcaacccccaagcaccacctcttccatctttaccagcagctgatgacctggaatctttacttcacggaggaaatagaggcaaacagaagagaacttcttcatcttcttcatcttcccaccacaagatgtatgattggttgaatgagagaaagactgtgatgtcctagaacttcagttgctcctatatccaatgtaattagcaacttaaattccaaaaccatatataaaaatcgatttttggccatttgagattatactctttactaccactttcctttctcttattataaccaagagttgttactatgtttgtgcctcatccaaataaaaagtaggtattttttagaaaatgattaacgggagcaattagtaaaacaagcagtaaaatacccggatacaggaaattgagccaggcttgctggtatgtgcttgtcccagctactcgggaggctgagttggaaggatcgcttgagcccaggagttccaggttatagtgagctgtgtcacaccactgaactctggcctgagtgacagagtgaaaccctgtttctaaaaaagtacttgacataggatattgagagaagaaatgctttggaactatgtttgattatacccttagcccaccttagttcttacttaagtaagttatagatgaaggagaaaagatgggaatcactttgaagattaaggcctcaaactttgtggaaaatggaggaaaaaatgttgaaaacagtcatgtgatagtttttaccttacacttttgatgggaaaattagataatagaattgagctatacgtatgttgactgcacattacattaatttaatcctgttatttacctcatattgctaacctttaaaattaagatttgaaaaaaaagagatgggtaaaaccaaaaaggtcaaaatttgtatgccagcttagatgaaatttgtatttatagaactgaataagaatctacaccttacctaatactgtgaattgcttatgtaaatacaacaaaggatggtccctcgatgacctgaatctcatatgctgagttcacttagtaacagcgtccgtctgctcagacacattttcccaactccccatgtgctttccaaacctttaccatgtttcccagtatcctctcttcatccctcattttgttgatgacctagttcctgcttcacatagtcaacagaacccaacaggaataacctcagctttcttcctccttgtccctttatttaactggtctcagaaggagaggtgtctttacaagctctccctctccattcctcctctgttgccaaagttcctgaaagtgtggtctccatatctgcttatgctacttagttttcttctaagtgaaaggtagggactcaaccccaaatgctctgaccctgttcgaagaccctgtggcctagagcggcatgtatttcctgatttctaaacctagtgccctttttccaggcctcatcctctatcactgcagcatttatctctgttgtcacattcttctgcttaaaacttttcacagcttttcacgtacccagggcaggcattcaaaaatattgaagcagtagttttgatgtcttttctgagctttcaccagtatttttaataggcactactgcctaaatgtcaaatgccttatagccaaaaacaagtaatgatttcctgtaatctccaaactgattcctcttcctcttgctatgtcttggtatccctgaggttaccatcattttatccatgtacccatgctagatgcctcaaggtcatccttgactcctcttccttctctggtttccatttggtttctaagctttgatgagtatctcccgcatcttcttttctttttctactatttcctatgactcttgcctctttctgtttattgtcttttgtctggattatttcagtaatatgttcaggagtttctaatttggattccatggatggacctcaaaggattaaagaactctctcaaatttgtatgcaaattttttgtgcatgtgcattttcctggggaggtccattagactgttctgtgggaaagagaggaatagaatgagagacaatgacaatttaaatcaggtccactgatttctcgttctatacctggcctttgttatttaggtcactaacctaaggcacttatctctgaggagtgaggtggcatgtaagatattaagaataaaacagcagcattagtcagtccagctgggcagtcagtccagcagccagagatcagaggctcctcaatatcagatccaggctttaatatcctagagaagctcaggagaaagctggggcatcagcaggagcagagggtgtcctcccgaggcccctggacccatttgttcctgtgcttccaaaggacttagagggatatgaaaacttaactggcaagaatccagagtgagttggtatccccagaaaaaggttcagaacattcccccagctagcctcccctcctttgcctgtttggtctctcgttctttctccactctgccaacacagttagcttttaaatacatatctcctggtgtgccttccgtgattgtcacttacacctaagggtgattagactaatcacccaaaaatgtggggttttaatcacctatgaaacaagttaaaaaatcatggtcatggtttcaaggcctgccagttaggagcctgccagcctcgtcgccaggcactgccctctcctcacttccagggctctggctacagcaggttactactggctgtttcgagagaacagtgtctgtgtccatatccctatgcctttgatcatgctagtctctctctttggggtggcatttcctctccattgcctgtgaacctcctactcattcttccaggcccacaatggatgttagctcttcacctgagtccattcttaattttctgccatcactctggcagaatcagtatctcttggctagagtccaaaaacatttcatacatatctctgataatgtcatattatattgtagatagcctatttttatttctgtctttcctactaagccagaaatgccctacagctagggactgtctttttcatgtttgtatccctaacagctacctttgcatctagtctaaacatgagcttagtacacttttgttgaatggaattagttataaagagtttttatgactcatttaaaattagagaccaatgcttacttaataagtcagaataggctgtaataataatagtaataataaagtcccatttccactgcttattcaagtaacagcttcctttgtggaagtacattttgaaagacttcacatgtcagtgtatatttttgatgtgctcatttgagatcctaaaagaattatagttctaaagcagactagagcttctattacattcctgttgaagttatattaaatatattctatcgtttcacatatctgtattatatataataagttgcatgggtaaacattttatctcttttaaacttcatggtaataatttgtgaattgtttattttataatatctgagtaaatttagttcaaaacacattaatttgagcattttctgtgtacagaagcatagttgcaaagttaagattcttgtgtttatgttgttttgttaaattcggaaagtctcagtcattgcaaatgtattttttttttaagtatttaaattagctcagctatgagaataagcacagtccataaattaagagcttcaaataattttttaaaatccttcatattctttgagttttgtaggaaaagaatcaacagtttacttattcagcctttcctgaagtccatagtaggtgctgggcatcatgctgggtgaatgagatagtacttgcatttgaatagtttacagtcttatagcgaagaagccatgtaaacagagaattgcaatataaaccttggaggagaggaaggaagactactttgagaaccgagattaggttgagaatggatgagtctgctgatcaatttatagataaagaagcagagaggtgaagtctttttttttttttttttttgatatgtgaaataggaacctaggttatctctaagaattcatagcagggggtagctcttgagaagaacagtgaagatctggataattaataaggagaattagagatgagctaacaaagacaagtaaagagtggcatgagaaagcagtgagcatagaactgaaactggatagcatgaaattctggaggtatcagtcagtagcacagtggtataattttctccagctgtgctatggagaaattatacacattgtggccaatgtgtagtgaataaagccatattgtattcagggactatggggtggttataacagaaatttacaaagaataaatagttaaaagtccttcaaagaaagcatggcttactagggaaggcagtatggttaagaggaagttgataaacttggagaaaatgtagaagtcaagaagttggagatcagaagggctggtgctttgtaggaactcagaaaatcttcattttcttctttctggatgtcctctccctatgaatgtttcaccaccaccacctgcctcagctacagtttatacatatgaatagtttcaaatcatgatggtaacagttggctcagagggcaagattaggagccagacttcaacgtgctgctaatccagcgtgtccctgtaacttagatgctggtagtgcttggtggtattggcctctaggagaagctcaaggcttctcctgttatctccctaccactcatacttggagggtgagtcaaaggccaaaaagcattttattgggcagtggttcttagggaagggatttactctgtgatgcagagggttaagactgtaagccatcaagtgtttcccctccctctccatgttcaaccaaaggcacagttcttattactttcaaggatttaaaaaggagtcttttctcagcataaaggaggaagtgaagaccaattttgacagcccaaagggtcttcctcctcagaatctaaaatttctaatagagttgtttgcatcttgtgattttacttgagtcatcaaatgtattgtactttttttcttaaagatatactttttaatgctttcatttcagataaggacaaaccattttccatggcgacacactatttatattgcattttcagaaatttccctttttacccatacttaggagtgtgacactgaaacctgataatctattatttcacagagtgcttttttgggtgtaatataaagatattatataattttaataacctttgaggtacaagtggtttttggttacatggatgaattatatagtagtgaagtctgagattttagtgcaggacccattgtccaagtagtgtaaactgtacccaatattagttttttattcctcactcccctctcactttccccacttcttaattttctgccatcacaatgtgttgcccaggctggtttcatgccctcactttccccacttctgagtttccaaagtctattactctgtacacctttgtgtacccataacttacctccctcttgtaagtgaaaacatatggtatttgattttccattcttgagttacttcacttagaaaaatggcctccagctccatccatgttgtagcaaaagatgtgacttcgttctttgttatggctgaatagtattccatgggatatgtgtgtgtgtgtgtgtgtgtgtgtgtgtgtgtgtgtatacacatatatgatatataataattatatataatttatcgttatatgtaaaacaaagcaaattttttatttttatagagacagggtcacaaagtattgcccaggctggtttcatgctcctgggctcaagtgagccaccacacccagccaaaaataagtaatatttcccagttagacattttcagagtaaaaagtatttgttcaaaatcatagcatgaatggactcttccagagacctttaactggcagcatttccccctcaaactttagtacagttataggaattgtttctggatttttggctgtatattcttgttcatggctcatggacattaacatatgtgaatggcatcactgtgtttttcctaaagtgcatacgaagaagaaagaacactttcctttagagtcttacttagattctagttagctgatataagactgttttcttttccttttcaggttgtaaacatgttaaaggcatcctgttatatggacccccaggttgtggtaagactctcttggctcgacagattggcaagatgttgaatgcaagagagcccaaagtggtcaatgggccagaaatccttaacaaatatgtgggagaatcagaggctaacattcgcaaactttttgctgatgctgaagaggagcaaaggagggtaatgtgaacataagtgtgatttagtaaaagtttatcactcgctatacgatgaatgagacccagagttatggagacaaacttgttgctttgatttatattttgaagcaacttacaggtaaatttacctagtacctaggttatatatggcactgcaccagggactgtggaagatttacgtgatgagcagatgttgttgcccacatattcctataaacaaaggtaggtgattgtgtaagccagaggttttgcaaaaataggtcatgaatatattttcaggtgacacttttattccatattgcttccagagacttgtgctcatttatcctttggaagaaaaggggaaattaaatccataaatagacttatgaaatcgtattatgtaaggttcatatgcaaaaagctatcttacttaacactgagtcttgctcagttatagagtgacaggattgagttgtcagagctcaaaggaaagcttgatttgcgtctcagaaatgaaattatttaaaaatcaagctagaatttactaattctgatagttttacatgtcaacttgactaggacataaagtgcctaaatatttggtaaaacatttcggttgtgtctgtgaggatgtttctggatgaaattagcgtttgagttgatagactgaataaagcagattgccctccctaatgtgggcaggccccattcaatcagtttaaggcctgaacagaacaaaaaggcttactttcctgcaagtaagagggaatttcgacttgcctggttgccctgagttgggacattggtttggatgcacaccgaaacatcagctcttcctggcttggaggcctttgggctggaactaaataatgcgtattagctctcctgggtcaccaggttgctgacagcagatcttgggacttgtcagcctctgaaattgtagatttatcccaaggaattggctaaaacgattatggaggctgacatatatatgtgggtgtatatgcatacatacatattcatagagatttatcataaggaaaacacacacacacacacacacacacacacgaacattctattggttctgtttgtctgttctgattaattatcctaatactaacatatttttttcattgacagtttaagaacaatgccatgagatttctggttctagcaatacagtagactaggtaaccagaaaaccttccttctataaacaccttcaaatgctaggtatacactgtaccccttaaatatgcacagttatgtgccaattaaacacaaaataaaacttttaaaagttctgggtaaaacataactgaaatcattttaaatgcataattgagctcttcagaaagaaaactggatctccaggaaattagagtcgtaagatacgggctgcagcttttggtttcataatatatgggtttgggttttagtacccactagggaacagaacatgagtccttgaatccatttacagtgtggactaggaactggtaccttcaaaggggttgtgtctatgaaaagagtggactagaaaatatctgctgccaccacagggaaattaacaaaaaatatttaactgcctgggttctggaatggaagctgggaaatctcctatgggaattcttcttcttctttttttttttttttttttttttttttgagatggagttttgctcttgttgcccaggctggagtgcaatggcgtgatctcggctcaccacaacctccgcctcccaggttcaagcaattctcctgcctcagcctccccagtagctgggattacaggcatgcaccaccacgcccagctaattttgtatttttactagagatggagtttctccatgttggtcaggctggtctcgagctcccaacctcaggtgatctgcccgccttggcctcccaaagtgctgagattataggcgtgacccaccgtgcccggcctcccatgggaattgtaaaccatggatccttgttcatgctggtttagaatttgaatgaatgtatgctacctatgtggcttgaaacccgaagctgagaaattagttaaaaaaattattcaggtgcagtggctcatgcctgtagtctcagctacttggaaggctgagatggaagggtcactagaacccaggagttctaggctgcagtgagctctcattgtgccattgcactccaacctgggtgacagtgcaagaccctatgttaaggaagaaaaaaattagtcctgggctagtgatagcataagttgtcagatataagcaaaccccagggggtgctccaacaacctaggctgaaaggaatagaaaaagtagtcatgaaaatttaaaactcagcaaccaagtttaagataagacaacaaatttcagctgaagagagaagtggtaaacagaagaataaacctaaagaaatcacccagaatgtagcacagagagataaagggatggagaagatgaaagttgagatgagagagttaaaacaagaagtccagatagaatagtgtagaggcattattcaaaaagagaatgactaagaatattctagaattaataaagacataagtactcagattcaggtagcaccatgagcctatatgggataaatgaaaattaacttatttctagacttgttataggagaatgccaaagaaaaaaaatcttagtaacaaaagaaagacatggagatgacttacaaaggggtatccattatgttgatagcaaacttttccatgacagaaagagagaacaaaaaacagtagaataatatcttcagagagctaagtgaaaataactgtcaacttaaaagttaatacccagcttaattctcattcaggaatgagggtgaaataaagactttttttcttcaggcaaaggataatagaattaactagttgcagaagcttgttggaagattatgaagcaagatgtactgagactgaaggaagttgaacccagaaggaaacagtagagccaagaaacaatgatgagcaatgaaattggtgaaaatatagataaagtctgggagttctacttctagtagtggcaaattaggtcatttgagtcatgtgttccactgaagactaccagaaaagctcaacacaatatttaaacatgttttgcttgaaggtatcaaagaagaaaaatggaggcctagaacaaaggtcctcctggtatactgggtcactgttcctctcgagatattagccagttctgcaggaagctgctaaaacctaagcagcccttttgacaggctagtgggagtaatgggggcagagattagtgcccatggcccctaaggaggggacacctgatgaacataactcattttgagtcaagaccctgaagggctacaccataggagcaagggttaaccaggagtagacatactctcactggggctgcagatcagctttgaatcatgtcagtccctaaaattagattgagggttcctaaattgctagtgcccctaggcatctggcagaattgtaaatccttcctggaagaaagtggtatcatgtaaggtcacaaattgtttctagtttgcaaatgcaatgtctggcttataatcaaaagcaactggaaacagatacacaaacaacatcaagaaaaagaaaagatggttcaaacagcctctagatattggaattctcagatacagacttttgaaataattatacttaccacattcaaggggataaaagacaagacagatttttggcagagaactggaaactaaaaataaacaaatataaattctagaactgagaaaatcagtaagtaaaattaactcaagtgaatgagtttaaatagcaggttagacacatctgaagagagaattagtgtactgaaagatataagatgaaaataaccagagacaaagaatgaaaggaattaagagagagtaagagagagagagagagaataccgtttaaaggtctggtgcgtgtatttaaagttccagaaaggcaagagaaagaggatgaatcaaaatcaggatttgaagagaaaatggtttagaactttctaaaactgatggaaaacattagtccataaattgcagaaatgatatgaaccctgagcaggagaaataccaaagaactctacatatataggcattattgttaaattgctgaaaaccaaaaatgagaaaaatcttaaaaggagctagagagcaaaggaaaattaccttcaaataagcaacaactagctagtagctgtcttctcaatagaaatgatggaaacaaaaagtcaatcaaaggccatttttaaagagctgaaagaaaataactgtcaacttagaattttatatccagtaaatggatgaatgatcatagaaatatataatggaatacaaggcagtaatgaaaataaatagcctacagctatatacagttgtgaatctcacaaataaattattgagcaaaagaaaccagatttcaaaaagaacacatactgtgtgattccatttatagagagcttacctaaagtatagtgtttaacaacacatgcttgggtggtaaaactataaaggaaaatgaattattaccataaaaatcagattgtggttacctatggggaaaggtcagggaggagtgcttgggaggggttgtgaggaggtgctcccaggatgctagcagtattctgtttcttatgattacgtaggcgttcattttgtgacagttcattgaggcatatattcacattttgtaacttttctctatgtgtgatgtattttgcaattaaaagttttaaaaataaattttaatagcattcactgagaaaaacaataatgatatgaatatttttaaaggatagaactaaaatatggaaaaaaacgtttgggaagtagattaaattcatgtaagctccttatattattggggaagatggtagggagtttgagaccagcctggtcaacatggtgtaaccccatctctactaaaaaaatacaaaaattagttgggcttggtggcgcacagctgtaatcccagctactcaggaggctgaggcaggagaattgcttgaacccgggaggcggagattgcagtgagccaagatcgtgccactggattccagcctgggtaacaaaagtgaaactccatgtcaaaaaaaaaaaaagaagccaataatgttagttaacattaagtcaaatgtgcatgtgaaagttgtacattgtgcccaaacttttccaaagcatagggaggagctgggaaagaaacaatggaaactcaaatactttagaaggcaagaaagaaataacaagactcaaagacaatgtgatgataataaaaaggtaattttaaaaacaatttcatttatagcagaaatcagaatgtaaagtgcctaggattcgatctagcaggaaatgtgcaagacctttaaggagaaaattctaaacatttttgaaaatctttttttaagcagctaataaatggtaagatataacatgttcatgtatgggagaactgacaatgtcataaaaatgagttctgcccatcttggtctgtaagttgagtgtatttccagtgaagcctaataggaattttttaacatttgacaacttgattctaattttttttgaggcttgaagagttatgagaattttgaagaataatgaagatttacttttatcacatatcaagacttactagaaagcaatagtaattgaaacaatgttatatattcatgtaaaaacagaccaaggaaacaatagaacacaggaaggaagagcctgctctatgacaagtgatgatacagatcagaggggagtaataggctggctgtgccttaaacggagctgagataattgactacctatttggaaaaagataaaatgcaattcctacctcacagcatacaaaattgcaaatggatttacaaaaaaacaaaaacataaaagcctactaaaatttataggaggaaaacttatttagaagaaaaataggcaaaaatgttttaagatttgaggctagggaagaattgatacagaaagtaaatccattggaagtgttaatttggctacattaatataaagaaaattctgtatgacaaattacactgaatacaaatgtctcaaactgggagaagatatttgcagtgtatataatctacaaagaattggcatcctctataataaattctctataaaaagtcttgtataataagaaaaatataaataccacaatttaaaaaaactgtcgaaggatttaacacgtagttctcagagaaagaacacaattgaagaaaagcaaatgaaaagatattcaggaaaatgtataataaaagagggattatttcttaaacaacctggcaaaatttacaacagctggtaaaaccaagagtttgtggggttatggagaaacaaggtctcatatacattgctagttggagtataaactagaagaatataccaagtgggtagtatcttgcaaataaatttgacatcttacaaaaatgaaaatgcacaaaccccatgagttctacttcaagaccactacctatgataaacaacatgacatgtaccaggatgttgattgtcatgctatttgtaatagagggaaaagaaacatcattactcttccttagtaggaaatggaatagcatacagatattaaaatgaatatgctgagcacagtggcccacgcctgtaatcccagcacttcaggatgccaaggcagaggatcatttgagcccaggagttgaagaccatcatgggcaacatagtgagaccccacctctacaaaaattaaaaattagccaggcatggtggcacattcctgtggtcccagccacttaggaggctgaggtgggatggtcacttgtgccggggaggtcaaggctgcagtgagctgtgatagtgccactgcactcccgcttgggcaacagaatgagaccctgtctcaaaaaaataaaatgaataatagatttacatagatcgacatgaataacactcagaaatataacatcccgtcttcaaaaaaaaaaaaaacctagtaagctgtactgaattaatctatcctaccatttaaaatttttgttgagggtaaaataatattaaatattccctttatagcaatcctcttagtgctttaagtctgcttgttgggtccttaattgtttcaattttatacaaggtcgtttcctttcctgctttccagcatttcattaagttcttgttcaggtctccagctagatcagtctcattggttctagcaggtgtgggtcttggtgggttggtgcaagtccattcactatttcaactcttcagaaagtcccggaaccagtcagttttgcagttcattcctaatactaagattgtttctgcttcacttatctttttaacttacctcagtgtaccaagaaaaacagtcatcaccatatactatctaggttgaataaactccgcttaaaaattattttagattattttccaaataatttacaaaatacaagaataaagagataaaaaactattaaaaattaaataagaacttaaatatataaataaaatttttatgccatgtttccctggtcttgaggtgttttggattttggtttttggaatatttgcatatacattaagatatcttggcgttgggactctggtctaaacatgaaatccatttatgttttgtatataccttgtacacacagcctgaaggtaatcctgtacaatattttaaataattttgttactgaaacaaagtctgtgtacattgaaccatcagaaagctaaggcatcactatctcagccactagatgtggatggtctgtggttggttggcatcaccattgtttctgagtgtaaatttatatgcctgataaataatcgttttcatacatgtattgagacacaagtacttaacagtaaaaaatatgacacaccattaatacagtgaaaaaatagtgagtttagggtaactaagcagcacaatggcatcaccagaatacctggataagctgttaaacaacagcaacaccaaacagcaacagtttcagtcaccacctacgatgttgtggggggcttttgttttggtttggttttttgagatggggtctcactccatcgcctaggctggcatgcagtggcaccatcatggctcaccgcagcctcaaactcctgggctcaagccgtcctcctacctcagcctcccgagtagctgggactacaggtgtgcaccaccatacctggctaattttaaaaatctttttgtagagacaaggtctccctaggttgcccaggctggtctcaaactcctgggctcaagcgatcctcctgcctgagcctcccaaagtgctgaaatgacaggtgtgagctaccatgcccagctgatgttgtgttttgattaaaagattatcatacagtaaccccctgtgtgtggtgcacctttcagattttggaacattttggattttgaatttttggattagggatactcaacctgtataccccaaatgggcaggagcctctgaatgcagtaactgttcatcagctgtcctgcatgaacttacaaatactgattctaagtttcaaatacatctttgttggcttctaaattattattacttctggttcttcttgcacttacagcatcaaaacataatgctttaagaatttttttgagatctttggctcctaattttgttgaagagaggatgaccattatatgttccacagttgcaaaacatttttatttttagatttgtagatacctttcagaatgatcaattctgttttttatggtcaatccaattttttaatgtctacttcatctatttcttctggctatctctctgtaatacctgccttcagcatctgtctacttttaaactatatcaagaaaatttggtgcacaaatgaaataaaagatgaaagaatactgtcatgtgtccttttagcaaaatgggatggcctcatttcttgtcacaagatattccacaaagaagactttctattgaataagtaactgaatgaaaatgctttgtccttagattaaaagtatattattcactcattgattcttgagtttgagaaaatgtatgtagggcatcatcatctgaagacacatagactgagattttacttataatcatcaatttcagcatctttattagagtcctaagtgctcctatcttattctttgtgttcaacttctgactcatctaataattctaaaacagtttcctcagattttcttcgtcattctggctagagaacttacaaatgttaatgcttaatcgtattcaataaaatgtagaatgaggtcacaaaagatgttagctccagacttcttttatgccttcttgaaagataacacatatcttgcacaacacagtaagaaaactgaagagtgatgtcatagtgatacttgtttcactgtttctaagtaatttagtcattttttattatactttaagttctgggatacatgtgcagaacttgcaggtttgttacataggtatacacatgccatggtgactggctgcacccatcaacccgtcatctacattaggtatttctcctaatgctatccctcccctagcccccccacccactgacaggccccagtgtatgatgttcccctccctgtgaccatgtgttctcattgttcatttcccacttatgagtgagaacatgtggtgtttggttttctggtcctgtgttggtttgctgagaatgatggtttccagcttcatccatgtccctgccaaggacatgaactcatctgtttttatggctgcatggtattccatgtgccacgttttctttatctagtctatcgttgatgggcatttgggttggttccaagtctttgctattgtgaacagtgcctcaataaacatgtgtgcatgtgtctttatagtagaatgattgtaatgggattgctgggtcaaatggtatttctggttctggatccttcaggaatcaccacactgttgaaacagcatggtactggtaccaaaacagatatatagaccaaaggaacagaacagaggcctcagaaataatgccacacatctacaactatctgatctttgacaaacctgacaaaaacaagcaatggggaaaggattccctatttaataaatggtgttgggaaaactggctagccatatgcagaaaattatacaaaaattaactcaagatggtttaaagatttaaatgtaagacctaaaaccgtaaaaatcctaaaaaaaaccgtaggcaatacctttcaggacataggcatgggcaaagacttcattcttctattttcttattttaatcctttttaagcatagttgagaataattgatgagtaatgatgtaatttctagtgtgatgaaatagcataatgtgtcttagattcataaaaagatctagtagatccaaatggcaattgtaagatagaattttattctatttttttaaatattgggttttttgttttgtttgtttgctctttggaaaaaggaaaaaagtcatgagatatcaatttttataaatagtactacttaaaacagaaactcagaaactgagattgggtctaacggaccctaatgagatactgaggattaaacactaggcagaagtgagttaaaatgccatatggagaagcattttataacatctcagttgtgatagttaccacatggctacataggtaactttggtgctgtttttaaagttgcaagcaatttaaatattaaactactgatgataaaattgagttagcaaagaatttccagttcgatattaattatagccagccttttcagttatacctttctcacatccagaaatggcttgatgtactcagctaatgacctcatgcaggatatatatgtgtgttacatgataaagaaaaacatcacttctgtaattttggacagtccacactgacggagatgaacacttgcatataggtcaaactagttaaatacagaacagccgcttttgaaagctgttgccagggctcaacagcgtcagctctgtttctatggagaaagactttgcagatgttaaaaacagagctagaagccaatgaatggaagaggattgtgctgtggaaatttaatttttttgataaagggtttattgatgaatcagctatattagtctgtgaacgttaatcttgacatcttctttacccaattcccaatttcttggaataagatcttgcttttatttaagtaacacacaatgtaaaatttgatgttattgtactgactaggtggggtaagggacctgatgacaggtaacaagattagtaaggttctgaaaaggtcagaattgtactgaattatgtttagaacagattgcctccatgatcatttaatcaaacagtgttcgtattgtctttgtccttgtccacatacgtgatttttgaggttgggctgagaaggaaatcatgattccatcaacaacataaggcacattgacagtaaaactcatatattatagcagctttttgtttcatgctgtatagggcagacaaccttgaagaaaaaaaaaactttaaaaaataatgtaaaatttcacagtttttcagtcacaaacagaagtatccttgttgtcactgaagatgacaagaattaatatcctgctgtatagaagtactttggcaaagttaaggttgtagttccaattcctcatttccaattttttctccagatggaaagatgaacagtttttggtattgaatttttttttaggaagcaagttatttatcattagatatctattcagtaaatgcaatgatacagaaaaatgaagtttttttccctcagatttgaaattaggttttaaaatatggagggagaacaatttgtaagtaatgttcaggaacaaaaataaaacctaatgaaactttagaaactttgatggacatctgtcatcctacatacaattgcattaaagaatagaatttattattattttatctggtttattatgctgtaaaatgaatttttctctttttgtatgtagttttatgaaatttcatacatgtatagattcatggaaccactgtaaaaatcaggatgtagaacatttgcatcacccccaaaaactccttcatgcagtcccttactggtcaccctttctttttagtaaccctggtaactaccaatgtgttctccatccctgtagttttatcttttcaagaatgtcatataaatggcgtcatacactatgtaacctttggggactggctgtcttcagcataatgcctttgagattcatccaagttgttgcatgtgtcaaacatccctttttattgttgaatagtatttaattgtgtgggtgtactatcatttgtttatctcttgacccactgaaggccaattgggttgttttctagtttggggcaattatgagcagagctgctataaaccaagtagtggaatttttaggtcatatagcattttatctattttttatttaaaaatatatattcagggtttgtttttgacccagttgaatttccttcaggtcatttttggaactctttcttcctatgtctgatgtaacatttcatctttcatctttgtcatttttttattcccccttttcttcagattactataggtatattctggtattgtagcccagaatctgtcctgcttttatattcctccagcttaattatatgatccatcttcttacggtatctacggcttgctacaagactattctttactatttgcagaagacgttcagatgtatcttgctatccttttttattcagttgtgtatatcttgttctctatttggaggcctttccaaatagatgtcttgttaactctttaatcttatcatgctagaaacaaacaaacaaaaaaaattcccttgtatcttttcccttctgcagcttccttatcatactacagggtaatttcttttcttcactgtcagtcttccaccctacatgcaagcaataatcaaatctagcatttgctgtttggtcatcaccactcctgtcaccaaaattctcattctgtttagattctgcttgcctcatttatgtaccattatttgtttctcactgaccttccaagtgcatacttcttttcatcctaaagccaagaataaaatcattttatataaagagcattctactttgcagttcatttactgatgtcctctgtttcagtaggaaggcctaattctagatttcagtctgtcatgatagtactataacttctgcttctcacattaggtaaattttattatcccttttataggaccttgactgcctctgggccttctgttcagttgaacccacatgcttctaacttcttagctattagaccctctctttccccttttatatgtctttgttttggtacagcttctcatacccaaaagcaggtatacctgttagtaaggaggatacaagttgtatttgtaggtggtatgattgtctacctaggaaattcaaaagagtcagatttttttaaaaacttagatattataaataagagtaaagtagccatatataaaataaatacataaaaatatatttccttcatacttctatactgtttctgaaatataatagaaaaatcccatcacaattgccaccaaaaaacatagctaggaatctttatgaaggaatgaaggaatttaaacaacaaaaactataaaactttattgggaagctgggcccaatggctcatgcctgtaatcctagcactttgggaagccaaggtgggaggatcacttaagtctaggagttgaagaccagcctgggcaacatagtgagaccttatctctaaaaataaaaataaaaataaattttaaaactttactgagagacgtaaaagtgttgaataattggagaggcattattcttctaaaaaaccaaatatgctatacagattttagtatttcctaaacttagatatttaacctaatttcagtcagagcttgggtttttgtctgttctttatttttttatttttaattggtggaggttattccccctcataagaatgattctgatgttcatttggaaatacacatggttggaaatagccaagatagttatgaaaaagaagaatgtatagaggagaagagcttcttcaatgtactactgtaaagttatggagataaaaacatgaatgaatccattgagcagagtagacaggctggtaataacctagcatacatcaaagtccaaaccttggtatgatggcagctcagtcaacgaagaaaggagggataatttagggaacaatgctgggtcggttatttgaagaagaattagttggcttctcactttacttgtaccatacacaaaaataaaacaccagataaagaattatatgtaaagcaaaaatttaagaaaagaaaatatgtgaccatcagtgtctgtaatggggaacaattttaaggataaaactaatgaaaataccataaaaataaaaattgtgctggctgtttagtagaaacagaaaacgccttccacttaccgaaaatataccataaataggctgggcacagtggctctcgcctgtaatctcagcactttgggaggccgaggtgggcaaatacctgaggtctggagtttgagaccagcctggccaacgtggtgaaaccctgtctctactaaaaatacaaaattagccagacttgatggtgcacgtctgtaatcccagatgtgagaggctgaggcacgagaatcgcttgaacctgggaggcggaggttgcatgagcagagatcataccactgcactccagcctgaacgacagagcgaaagtccatctcaaaaaaatatatatacttatatatatgcacacatgccataaagaaaagacaactggcaaactagaataaagtagttacaagtataataatggccctaatgtataaatcattttttaatcaataggaaaagctcttgaatttcaacagaaaagggtatagaagacatatcaaatactaataaaattaccaatggtaaaaacatgattttttaacagcaccagccccttcagtaattagataaatgtgatttaaaaacaacagaaagatactattgtccatctatcaaattgagaattacttttaaagtgtttctaatattcattacttgtgggaatataccaagataggcactatcaggtactgtgctgggattatagattgataaaacctttctggaaaagtgtttctactttttcaagtgttcctatttcaagggccttaaaatacttaacacaccttttaacctaacaatttgcctttagcaagtattcatctatattgtcaagcgtttaagtataaaaatgttcattgtaggctgggtacagtggctcacatttgtaatcgcagcactttgggaggttgaggcaggaggatcacttgagtcctggagttcaagaccagcctgagcaacatggcaaaaccccatctctacaaaaaaaaataaaatattttccaggcgtggtagcacgcatctgtagtcccagccactcgggaggctgaggtgggggattgcttgagcccaggagtttgaggctgcagtgagctttgatcgcaccactgcactccagcctgggcaacagagtgagatcctgtctctacaaagaatgaaaaaagaaaatgtttattgcagcaacatatataatactaaaaacttagaaataattaaatatctaacagtaaggaatgaatatggagtaggagagttaaactgtgaaaccattcatatgattaaatattatagagctattaaaaatcatatcatcggccaggcgcggtggctcactcctgtaatcccagcactttgggagggcaaggcaggcggatcacaaggtcaggagatcgagaccatcctggctaacacggtgaaacccatctctactaaaaaaaaaatacaaaaaaaaaattagccgggcatggtggtgggcgcctgtagtcccagctactcgggagtctgaggcaggagaatggcgtgaacccgggaggcggagcttgcagtgagccaagatcacgccactgcactccagcctgggcaacagagtgagactccgtctcaaaaaaaaaatatatatatatatatatattgtatagggatgggaaagggtttaaaataatacctgtactgaaaaacaggatgcaaggtattacatagctccattttggctgagtttgagatgattgtgatttctttattttttgctattttcccacattttttataattatatattttgcaattggaagcaaaaataaccattgaaaatcgttttcaaagaataatattcaagagaatacaaggtgcagtaagttcttaatatttagttaaaatatagaaatctgtggaccattaacagcacttatctttaggtaatgtaatgatgttttatagatgggtctttattgatgggatgtcactatgttgcccaggctggtcttgaactcctggcctgaagcagtcttcccacctctgctttccaagtagctgggattacaggcacaagccatggcaaatgtagtatattttaatttatgtttttagtgatggaatctcactgtgttgcccaggctggactccagctcctgggctcaaggattcctccagcctcagcctccagagtagctgggactataggcacgtaccactctgcccagctttatttttacactttatttgttttacaacttttgctctgttaacaaatctactactcctttaaaaagttaaaaaacattctcttattaaaacaaagattaggctgggcatggtggctcacgcctgtaatcccagcactttgggaggctgcgctgagtgaatcacctgaggtcaggagttcgagaccagcctggcaaacatggtgaaaccccgtctctactaaaaatacaaaaattagccaggagtggtagcacatgcctacaatcccagctactcaggaagctgagacaggagaatcacttgaacccgggaggcagaggttgcagtgagctaagattgcgtcattgcactccagcctgggcagcagagcaagacttcatctcaaacaaacaaacaaaacaacgattatatccttatcagagatttaatggatactaaccatatttaatcctcagtctcattatgctcatttaatttttattatccgtatgttgtcatatttaggttatgttcattttttaccagttttgttaatccctagtgttttttgtttttgagacggagtctcactctgtcgcccaggctggagtgcagtggtgcagtctcggctcactgcaacctctgcctcctgggttcaggtgattttcctgcctcagcctccagagtagctgggattacaggcacctgccaccacacccagctaacttttgtatttttagtagagatagggtttcaccatgttggccaggctggtctcgaactcctgacctaagttgatccatcctcctctgcctcccaaagtgctgggattacaggcaggagccaccgcacccggccgtgttttttgtttataaaagaaaaaatttccagagtgcactttactccctgataggagactaaattacttaaatataaattttagaaggtacgtgttaaattaacctaatgaattagtagcattcagaagtgtttgtatctgttaaagattcaaaatatacaaactaatttcttttaatggtgattctatttctagtaaactaaggcagaaatcattatgcagaagaaacagcaccctgttaaccatgttctttttataaaccgtctctgttctcactttattgttaggaaggcgtaatctgttttcatgtaatataagtacatgtgagtcatgttgagtttcttcactcatttgtccaattcccagtcaacctgtaggtggagttaacctttagttacataatataacgaaacaaacattaaacctactgcttctgggacagtcttctcaccaaaattcagggaaaatgggagggtgttgccactgactgacttaatgaaagtatctgacaaatgtaaggtctttcaaatagtgagataagaaatgtatataaattatttgatcgactacttactttctatctatacacacacactatcagtatataatgtgtattttcattttatagctattaaatatgaggttctagaatgagttttcagtttgcagaattctgagaatctagttccaacacctttgagaggacaacaaccacaattgcacttgccatatttattagtcaaaatgaagcgaagtcaatctgttgaaagctttgttttgtttttctgattagtttgtttaataagacattcaaattatgatctttaatataatttcttcccctaatagcttggtgctaacagtggtttgcacatcatcatctttgatgaaattgatgccatctgcaagcagagagggagcatggctggtagcacgggagttcatgacactgttgtcaaccagttgctgtccaaaattgatggcatggagcagctaaacaacatcctagtcattggtatgtttactttttaaaaaagtactattcattcaaaaacgttagccataagttctgaattaagatgtgtgtaggttgtgattaaactgttttgccagtgtttccaaattagaatccagtgatattgaagaatctattgtaatgcctaggcttaataggaaaaataaaagatggatttcagtcacttgtaggtttaagcttatagctcacccacaggtgaaaaagatgtaggttgaagcttatagctcacccaaaaatgaaaaatacacatgaaacaatggaatgcagtggttttcaaactgggtcttgcaggccttcaggggtcctcagaggtgctttcagggtcagtgagggccagggagtgcgtttcagatcctacatcactattataacttcctcttttagctgttttatgtactgaggtgcttctgaagatgacttctggggaaaaaaaaaaaaaaacaccctgctgttttatgaagtctgaaaaccactggcctgtaaaaaagagaaggaactttggagtcagagagatcgtgtcacattgcccctctgtcactttgacagattatttaccctttgaatcttaaattttctttttaaatactggaagttttcataacatttatattccattggcttatacagtagtgaaatagtaaagcaaagtctccttagcttgttagggaaattactattcttacatatactaaaaggacatttgattttatttttgaactctgatcatttgttgttttgttttaacatctgtgttcaggaatgaccaatagaccagatctgatagatgaggctcttcttagacctggaagactggaagttaaaatggagataggtaaggagatctgtcactgattgggtgtgtggtggggggagtggaggcatttagagttcattaacaggaacaatgtcatatggtgtagtattttttagaaaaggtttatatcatgagaagtagatgtttacatgcttgagtacctataaggaaaacattaggatcataataatctcctctaggctgggcgcagtggctcacacctgtaatcccagcactttgggaggctgaggcaggtggatcacttgaggccagttgttcgagaccagcctggccaacatggtgaaaccccttctctactaaaaatacaaaaaacttagccgagtgtggtggtgtgcacctgtaatcccagctactcggaaggctgagataggagaatcgcctgaatccaggaggcagaggttgcagtgagctgagatcgtaccactgcactccagcctgggaaacagagcgagactctgtctcaaaataataataataataataatgataatctcctctgatggtgctttcgagactaggaaaatgcctattttatttttaatttcatcaggcttgccagatgagaaaggccgactacagattcttcacatccacacagcaagaatgagagggcatcagttactctctgctgatgtagacattaaagaactggccgtggagaccaagaatttcagtggtgctgaattggagggtctggtgcgagcagcccagtccactgctatgaatagacacataaaggtcaggaaaatcagctaaacagattataaacattatgccggtattctttctctttcctttcaagcatatcaaggggtagggaaatgctgacttttggtggagaagagatggtaaaaggaataagaattaattgtcaactgctaaatcttcagagtagcaggaaggaagataatgtttgcatctgccctgtagtaaccactgactcatctaccttaggtcatcaccatctgacacagacacgtaaagtgaaaattttgaagaagtgtttttaaatctttgtattgtattaaaagttgtaatatggccaggcatggtggctcatgcctgtaatcccagcactttgggaggctgaggcgggcggatcacaaggtcaggagatcgagaccatcctggctaacacggtgaaaccccgtctccactaaaaatacaaaaaattagccgggcatggtggcgggcacctgtagtcccggctactcgggaggctgaggcaagagaatggtgtgaacccaggaggcagagcttgaagtgagctgagattgcgccactgcactccagcctgggtgacagagcgagattccgtctccaaaaaaaaaaaaaaaagttgtaatatgtcagaggaagtgggagtttccacgtactagaattttgggggctgctttattcagcaaatatattgaatagttgatgtgttcaagctattgggctggagacataaagataattgtgaactcttccctcaaggagttcagagtcaggaaaatggacatattttcaaattagtacaataatattgtagttaccatggtagaaatacgtactaggatacttttattttgataaagtgctcttgatcttccatctcttctctcctttaggttttagttaccacctgtagacagatttactgaacatatctgtctcctactttcagatttgtactaaataccctcacctagatgttttatcaggtctcagatttaatattgcaaaaccaaatttattgtcttttttactactttcctttctgctcgcatttccctgtttatcccaatttcccaggcttaaaacatcaggattatctttgattcctgacactctactgtgccctaggtcaagtcacttgccaaattttttcagttctgtcttggcagtgccttttagttctcactgccactacccaccttctctttgattaaccttcctgtatcatatcattcaaccattcagacactttcagtgattccccatcatttacaaaacaaagtacaggcttcttttgggtcttttgggtcctctagatctgaccctaactggcctttccaaatgtgctcctgattattctccacatacttcagccaaacttaaataatcaccggtcatcagacattaatttatttttcaacatctctgctttggttttgttttttttgcatcactgaggatcttcatcctctacgtttacctgtcttttcaaaacctggctcatatgctaccactgtcctcacaccttttcacattttccctttcaagaatgttatacccgtttccttcttgaaatagtaatgtatcatttatggtactgtcagttgactttggttcacagtagatttattcggcatctactgcatgctagaccctgtgctaggagttaataccccaactgcaaagaagtaaagtacctaccattaagctgccctcagtctaaccctccacgtgcagtaacagaaagtacatgcaaggcaagagagtgaacgcatgtcagatatggtcaacttgtggggtgagagaaaccttcatatgcatgtctgttggtagagcagggccttttaggtagagggaacaacatatgcaaagaagcagagacacagaatagcatagtgcgttggagtagtttagtattgcttcagcatggaagttaggggagggatggtagagagattgtgggggataagtcaggagactaaagtagggatggagcacaaagagccttttatactctgctaagaagtatggactttttttctgtgagtagtgctaagccattgagttttaagaatagcagtgacatagtgttaaaacataagatcactctggcagctctgtcgagtggagtagttagaggagtggagttggcgacacaggacaagagggggagcttttataacagttcaggcaagaaataaaagcctgaacagttaggttgagtatgtagatatttgggtatatcctatcactggttctagaccaggaatccagccaactaccagtttttataaataaagggcttttttggaacagtacacattaatttgtgtactgtctatggctgcctgcatgctacagtggcagagttgagtatttgcaataggggctgcatggcccacaaagcctattttagtgcttttattttaggtactatctgccactttacagaagtttgctggcccttgttctagactttaaatccttatcttattcacctcagagtctcccatagtaccccaaatagatctaaataatgagcacatggtaggtgtccagtaaattatttttcttttttttttttgaaacagagtcttactctgtcgcccaggctggagtgcagtggcacagtcttcgctcactgcaacctctgcctcctgggttcaagtgattctcctgcctcagcctcccaagtagctgggactacaggcatgtgccaccacgcccagctaattttttgtatctttagtagagatggggtttcaccatgttggccaggctggtctcaaacccctgacctcgtgatccgcccgcctcagcctcccaaaatgttgggattacaggtgtgagccaccatgcccagccaatattttttaaatgagtaaacttacgtaactattctgaatcacgctctatccataagtcataatttccctacataatagaggtggatttgttctagctcaagaatgccaaaggtttggatggtgtgggaatattgtattgggtctttatataatggatccattcagggactatgtttttattcttccttgtttgtttgttttgagacggagtctcactctgtcgcccgggctggagtgcagtggtgcaatctcggctcactgcaagctccaccttccaggttcagccattctcctgcctcagcctcccaagtagctgggactacaggcacccaccatcacgcctggctaagtttttgtatttttagttgagatgggatcaccgtgttagccaggatggtctcgatctcctgacctcgtgatccgcctgcctcggcctcccaaagttttgggattacaggcgtgagccaccatgcccggccatgctatactgttttaataagaagagatggcaacttcaagaaaaatgatgtaaacagtgtgaaaactggtccctaccatactgatctttcatctcagaccacatgggtgcatcttgatgtaatccacagtaactagtttactagttgtcatatttttcatatgtgttggccatggaatttttctcttatttagtcatctgtcattttaactacaataatcctatcccaaaatttcactttaagccgttgtctcagtaagaaacatgctttcttcaagcatatattgggtttatctacatatgaggcaatgagggatggtgggaagatcgcagatatcgtagtcagaaggtgtggttatgcattatatttcttccacctttttgtttctgacctgtcaaggggagacactacctatctaatcagatttttatgagaatgaaagcaaatactttatataaaagtgccttgtaaactctataaatgctagttatctccatttttttaattggctgatttgagaggatatcagtacttttcaatatatgaatttctgatttttattgactctttgtagttacacattttctaattgtaaagctaaaatgtttgtcacccttgtacataatatattatccttctgatttgcaagtaagcagtagtgcaaatagttcatgtttccatcacttttttccacatgatagaattatctgtaagcttcaggtgatatgtattgacttgcgatcattgctccttgtaccaaacagctcctaacttttcaccatatcaatggaataactatgtaggcactttagggatgagaaagctatgtaagacactaaccttacccccaaaaagaaatattactaacatttcatcttctgcattttaaaaaatctgcattgtcagaaggtctttaaagactatttttccaatgactcgtccttggctaaacaaaagaagtacagttttagtcttccattgctatagatgtttgtagctttaatagtgattgatgaataaatatttaaattgaaacttataaagttgttactgaactttaaaacattcaaaacgtacaagtgttatgatgttctttctttgtattttaaaaatccattattggtgttattttgcttccttttcaaaagattgaggcctaaagaaagatttagtcaggtggactaaacaggtctttcctgttaaactgttttttcaggttttctgagacaagtggaaaatctggtcagaaacacctgttgttcatgtcatttatacttgaacctatgattgcggtcaactaaaattcatgtgacatttggttgtttttatcttgaaaggaatttctgcttcaggttgagaagattcataacccaaattttttctctaatctgttgtgaggaaataaactgaggacacacacacacacacacacacacactttctctcacatacactttccaccggagtcaaagctctaagttatgtttacagaatttcataaaattatttcttatttttttgcagaatttttgattgattaaggtcattctacccttaatttaagaggaatgataagaactttgaaaggtcagatttaaaaggttatgaaatttaagggtgaccacttgatatttgctagtgttgaaatacaagtttattagtttctgcaggtataagctgaaagatgctgcctcttctatattgattagctgttataaataaaatgcaggaaaaatgttgctaattcaaacaaatgagaaaaggttttctgaaaaagtaaaaattcagaattatagactttttaaaattttacaaattttgataaaatgctaaaagtcagctaagagcagtccttagaaaatttattttaatgagcaggtaggaataattgacaattggaatattgatggcttacaattatgtaacttacagaattccttatgtgcctgaaaacagtttgttttgaaatacttcttccccacacccatcttaattcacttttaagaaaggactcagcaattaattgggtgagtcttttcttaataattagcaaaatgacaagttttataccagcttcagtcctaaaatctatcgtattttttggcaaattttgaaagatgggcaagatttttctttcatactgctgtatgtatctatcatttgaattcggttttactgtaagagaatcagaatgcaaaatattatggtaaaaacctaggcctgtgtaggaaagaggtgtttaaagtgaggctggtagctttgttgagattttaatgtttcggtcagagctcttgtcttccctttggcctgagagtttgtatcttgtagaatcctttcagatgtatcaaaaagtttgaatcagagttaaaacttttatataagggtatctaggaaggaagtcctgtatctgccttttataacttatggaaacccccaggtttgtataagtataaaatgagataatgtgatatggtgaaatgagatagtgtgtatgaacatactttataaactataaagaactgtagacatttgtatattattaattatcataattctttcacggatatgcttgtttcctgtgacaccatttttctttttttcttttttttttttttggagatggagttttcttcttgttgcctaggctagagtgcaatggcgtgatctcggctcaccacaacctccgcctctcgagttcaagcgattcccctgcctcagcctccagagtagctgggattacaggtgtccaccaccatgcctggctaattttgtatttttagtagagacagggtttcgccatgtaggtcaggctggtctcgaactcccgacctcaggtgatccgcctgcctcggcctcccaaagtgctgggattataggtgtgagccaccgtgccaggcccatttttctttttttaaacttagaaatgccaaataaatgcgattaatatttatcaaacctcatatgtgccaatataagccctattaataatttaaatgtttatgtttttttgtttgtttgtttttgtttttgagacggagtctcactctgtcgcccaggctggagtgcagtggcgccatcacaactcactgcaagctctgcctcccgggttcacgccattctcctgcctcagcctcctgagtacctggggctacaggtgtctgccaccacgcctggctacttttttgtatttttagtaaagacagggtttcactgtgttagccagtatggtctcgatctcctgacctggtgatcctattgcctcagcctcccaaagtgctgggattacaggcgtgagccaccatgcccagcccaataatttaaatgttaattgttctattgaagtaaaatatttgtctctttgttactttttactttatttttaaaagtatagaagttatagatgatggctttctttttgtaaaagattcaagaatgtcaaagcatatagggaaaaatgagaaaggccatctctaacaccactttcctttccctctccagagttagccaaaatttgggatatatctttgaagtttgttttctttatataatatttacattcatatacgtatgtgcttttttaaaaaaatgaacattaatggaattatactgcagtttacatttttcacttgcaaatattccttggatagctttctgtgtcagtgtatgtaagtccccttcattattttggacaaatgcagagtattctagaatattgccacataatggaaaatataagatccatgaacacagggaccttttctgttttatttactgctatgactccagttcctcagatagtgcttggtgtctggtaggtattcagtaaatagaattaatgaataatttatttaacatatggattatttctggttgtggctgttgaaaaaatactgttgtgaaaatgcttacttgcctccctgtgcacacaaggaatcattttctagggtagccatccaaatgtcttttcaaagacatggtttcattgtcttctagtttctagtgttgccagtgagagttatcataccaatctcgttctggtttctttgcaggaaacctgttttgtccctcagaaaggttctaggactttctcttcacctttggtgctctgaaagtttacagcagtgggtctggacagatgtgtgcttcttttcatttatcccgatcatcactcactgaaccctttaaactgcagaggcacacctttcttcagctataggaaatttttttctcttctgtcttttattgtttcttctctatgactctttctgttctctccttctgagactcctgttagatcacagttaaaacttatggatatttctttcatgctttgtagcctttctgtctcactttctgtcattttgtgggatttggggcggaagggaagataaataactgtgttctgtttgccatcttcacccagcttcctgccatagttctttttatcccacaaggatgacttttttttatatctgtcacttcatttgtctcacagtctcttcctaaaaaaaatatgactcatatttcataataattgatggaaggttgatatttatttaacatgcgtttgttttatagtcagctttttttgaaaatgctttttttttcaaagccatgataccaatttaaaaattaggctgtgttgttttgtgctattggtagtgagcccagtcgctttaaaacacgtgttggtatcttaatcactcatctggtccaggcagctccaagtgctgataaaggccttgatgcttctccagatgtctaaatgctagctccaggtgcagtaagcagactatttggagctggcacatagattctgaagcacaatgtattaatacaaatgaaagttttaggttcttggtctcctagagtaatggttcttaagcctggttcagtaccagaatcacctgtggtacttggtaaaactataaagaccctctaataggcctgttaaatcaaaatcccgtggggaatgggactgagcgcctgtatatctctgaaggctctggaggttattctgatatgcagccaagtatggctgtgttttcatttctgtatatattttctttttgtatggatttttcactgttcttactctctgtatgtattttttcttactcatgcctcatgagttaaaatggctatacagtgtcccttggtacagatgtgttctaatttacataactgatcccctcttggtagacattattaatatgcttcccatcttttttcataacaagttactttagtagatatacttgtacatataactttgtacacatttgtgaatatatttaggggataaattactagaagtggacttgttcagaggatatatatatttgtgaatttgagagatgtgttttctttgattccaatttttaaaattgttttaaaatgcccataaaattgtccgggcgtggtggctcacgcctgtaatcccagcactttgagaggccgaggcgggtggtcacaaggtcaggagatcaagaccatcctagctaatatggtgaaaccctgtctctagtaaaaatacaaaaaattagccgggcgtggtggtgggcacctgtagtcccagctactcgggaggctgaggcaggagaatggcgtgaacctgggaggtggagcttgcagcgtccgagatcgcgccactgcactccagcctgggggacagagtgagactccgtctcaaaaaaaaaaaaaaaaaaaacagaaaaccataaaatttaccgtgtaaccattttaaatgtacaattcagtggcattaaatacattcttaatgttgtgcaaccatcactaccattcatctccagacctcttttcatcttgtaaaactaaaactccatacccataaacagtaactccccattccttcctctccctatcccctggcagccaccattttactttctgtctcttggatatcagctactccaggaacctcatataagtggattgtacagtatttgcttatttaacttagcgtatggtcctcaaggttcgtcatgttgcaggatatcagaattttctttctttttaatgctgaataatattccattgtatgtacgtaacacattttgtttatccattcctctgtcaatggtcatatggatttcttccacattttagctattgtgggtaatgctgtcatgaacaaggctgtacagatatctcttcaagaccctgttttcagttctttgggggtatatacccagaagtggaattgctggatcatatgataattctatttttaattttatgaggaaccaccatatttttgttttccacagtgactcaaccattttacttatgttcccaccaacagtgcataagggttctgatttctccgcatcctcaccaacacttcttattttctgcatttttgtggtagtagccatcctaatgagtatgaagtgaaatctctttgtagtttggatttgcatttccctaatgattagtgaggttgaacatcttttcatgtgcttatttaaggccatttgtatatcttctttggagaaatgtttgtttaagttctttgcccattttttatttagttttttgttgttcaattttggcagttctctatgtattctggatattaatcccttatcacatatatggtttgcaaatatttcagatttttttatgtgtgaaaatatgcttttaaatcctcaagagttacgttcttaaattgaatatattcttaactattcttaaatcttggaagtccttacattttgtttttatctcttcttaggccagtactaaagtggaagtggacatggagaaagcagaaagcctgcaagtgatgagaggagacttccttgcttctttggagaatgatatcaaaccagtgagtatgcccattgagtgatatataggccaaaaagtaatgataataataactcaggcgaaacgtaagtgccatttactcagtattatggaaggttatagcatatgcagtttcataaaatgagaaaattttagtattggaaatgttcagtatgagaaacatctgtacaataatcctagtggctggtgatattatttactgaaatattttcatgataggaagcttaccatcttgtaaggcaggccattcaattttgagactttccagttattgttttactttatattgaactagaactaattttcttattggttcttatacaatcccaagctacagaaacctaacttcagtccatcttccatatgtcagttattaggatatttaaaattaactctcatatcctcctctgtctctctctctctctctctttctcttcctttcctcagcctcttccaaggcatccctttttcttgctcagtacatttagtttctctgactactatagtttctaagacttaaaaagtgtcagttttcttaaaacgcattcaaaatggtcatagttggagctttagaatacagtttaaggttattaacccattttcctataaaacaactactaacatttgagtaacttttgtttagagtcctgtgttaatacaaaaacaaattgtagaaagtcccagttcttaaagaagtgtgtgcttttctttcttaaatggacctcaggtccattaagattaatcttaatctttatgacacactgttattagtctgtattttcatggcgtgtaaaataacatatggtatatgtagttttctgggacttgctatttattaaatattttattaccaagagtcatctatatcagggatccccaaccctcagtactggtccatggcccgttaggaactgggccacacagcaggaggtgagcagcaagtgagtgagcctcatctgtatttacagccactccctattgctcgtgttaccacctgagctccacctcctgtcagatctgtggtgacattagattctcatatgagtatgaaccctattgtgaactgcatatctgagggatctagattgcacactccttatgagaatctaatgcctgatgatctgtcactgtctcccatcacccccagatgggaccatatagttgcaggaaaacaagctcagggctcccactgatgctacattatggtgagttgtataattagttcattatatattacaatgtaataataatagaaataaagtgcacaataaatgtaatgtgcttgggctgggcatggtggctcgtgtctgtaatcctagcactttgggaggctgaggcgggcggatcacgaggtcaggagttcgagaccagcctgaccaacatggtgaaaccccatctctactaaaaatacaaaaattagctggatgtagtggtacgtgcctgtaatcccagctactcacgaggctgaggcaggagaatcgcttgaacccaggaggcagaggttgcagtgagccaagatcgcaccactgcactccagcctgggtgacagaacgagactctgtctcaaaaaaaaaaaaaatgtaacgcacttgaaacatcccgaaaccacctcctcccccaatggaaaaattatcttctataaaactggtccccgatgccacaaaggttggggactgctgatgtatatgatttcttgtagctagacatcattcattttcatgctgaatagcattccattgtgtgagtaccacaatttatctattttcctgtcaattgtgaatgttaccagttttttgttattaaaaaaagatttgtcgtaagaattcttgaatgaatttctcttatttaggaataaaattattaggttgttggatatatgaatgtcccgctttaaaaaaacatttcccagtggttgaaccaacactgcccccaatactgtgaaacatatcctcttgttctgtatcctctccaacacttggtattatcagatttattttttatttatttattttttttgagatggagtctcactctgtcgcccaggttggagtgcagtggtgtgatctcagctcactgcaacctccatctcccgggttcaagcaattatcctgcctcagcctcccgagtagctgggattacaggtgcttgccaccatgcttggccgatttttgtatttttagtagagacggggtttcaccatgttggctaggctggtctcgaactcctgacctcaggtgatctgcctgcctcggctttccaaagtactgggatctcagcatctgtttgtttttaaaccttccctagtctgtgcttatgtgttttgcttgtttgttttttgtttgtttgtttgtttgtttgttttttgagatggagtctccctctgtcacccaggcgggaatacagtggtgtgatctcggctcactgcaacttccacctccctggttcaagcagttctcctgcctcagcctttcaggtagctgggattacagtcacatgccaccatacccggcttatttttttgtatttttagtagagacagggtttcaccatgttggccagactggtctcaaactcctgacctcaggcaatccgcccgcctgggcctcccaaagtgctgggattacaggcgtgagccactgcgcctggcctgtgtggtttttaaattaactttttctagtctactaaggtttactcagacctttagcagttgttcttggatactgactaggcccaaagtcctcttctcatcaatgtattggcaaatacactcacttgcgatgtgatatgagaccctgaggtttacctcccaaacagcaggatgtctgttttgagagtttcctggccaagtggtggaaagtaccatggaaatggagtcttccttgcttcttacttaacttgagtttggaccatagagaagtcattcttgtgtggacctcagtttactcacctgtacagtataggatggactagatgatctaatgatcaggggattggcaaacttgttcttagggcaccaattagtaaatattttaggttttgcaggccacctggctatgtcacagctgctcagctcggccctggtaggatgaaagcagccatagacaataagtaaacaaatgagtgtggctgtgttccaataaaactttatttacaaaaacaggctgtggccggccatagtttgttcaccccatttttgagctcttgacattctttagtctgtgatttcgataattagtttaggaaaaaagctttgactttcataaataatgcttctggaaatctagtaaaacctttaaattttggccaggcatggtggctcacacctgtaatcccagcactttgggaggccgaggcgggtggattgcctgagctcgagagttggagaccagcctggccaacatggcgaaacctcgtctctactaaaaatacaaaaaattagccgggcgtggtggtaggcgcctgtagtcccagctacttgggaggctgaggcaggagaatcgcttaaactcaggaggcggaggttgcagtgagccgatatcatgccactgcacttcagcctgggtgacagagtgagacttcatctcaaaaaaaaaaaaaaaacctttacattttatttttgctttttccctttatcaggaaagtaatgtagaaaatttagaaaacccagaacattaatattttggttcctctcattaggtaaccatctttgggtggacatgtgtacatacatacatacttttttttttttcttttgagcaaaaaagtacatactttttctttttttctcttctgtcacccaggctggagtgcagtggcgcgatctcggctcactgcaacctccacctcccgggttcaagcgattctcctgcctcagcctcctgagtagctgggactacaggtgctcgctgccacacccagctaattttttgtattttttagtagagatggagtttcaccgtgttgcccaggctggtgtcgaactcctgagctcaggcgatccgcccgcctcagcttcccaaagtgttgggattataggcgtgagccactgcacctggcacatgtatatgtatgtattttttacaaaattggatgaagtataatttatttgctaaatattttcacttatgccatgatatcttatttaatctttaatttgtctatgaaaatacctgctctgctaggggacttctagttgaaaactcattaatttaaaaaattaattttgaattcagccacctattcttttttctaattgtttcttgtagcttttgctttgattggagtaactttattctaggaataaagttgtgtcatctgcaaacatgaatcatgtacacatctgattttcttatatttatgtctcctttttctcttcaaattacattgcctttaccattgatgggaacctgggtaataaagaaaaaagaaaaaaattgcattccctaccacctcctccaaaacaatgtcaaatgttagttataatgataggcatcttagtatgctatcccaatttaatggaactgttgcagatatttaatggttaactgttggtttgagacctttaatgtgttgagtatattcacctatttcaattttttttctgtttaagtttttttttttaaaatcagatatggctattatattttgttaaatgacatcttagcatcttttaagatgatcatatagttttcctcctgcatgctacatattaattacagtagtgtatattcatagaattatattagtagatcttatattgattcacccttacattcttgcagtgaacctctcttgatcatattattttttcatgtactgtttgactttatttatttagttttgagacagagtttcgctcttgttgcccagggtggagtgcagtggcgcgatctcagctcaccacaacctccgcttcccaggttcaagcgattctcctgtctcagcctcctgagtggctgggattacaggcgcccgccactacgcctggctaatttttggtattttcagtagagacagggtttcaccatgttggccaggctggtcttgaactcctgacctcaggtaatccgccggcctcggcctcccatggtgccgggattacaggtgtgagccatcgcgcccggcccgtttgacttttaaataggtattttaattttttagtttatacgtgtacagtgcataatgtatttaagattcatctgtgttgttgtatcagtagtttctttattgctgagtagcagtcctttatatgagtgtatcacagtgcatttatctgttcaatagttgaatatttcaattatttctagtttgtggcagctatgaataaagctgccgtaaacatttccataatgttttttgtctgaacacaattcttgtttctcttgagtaaatacctaggagtatgatttctgggttgtatgtttataagaaactgccaaaactgttttccaaagtagctgtaccattttgcattcttacctgcaaatgtatgaagagttccggttgctctgtatcctccctagcacttgatattttcagggttttgttttgttttttttttttttttttttttgagatggagtctggctctgtcacccaggctggagtgcagtggcgcgatctcggctcactgcaagctccgcctcccgggttcatgccattctcctgcctcagcctcccgtgtagctgggactacaggcgtctaccaccacgcccggctaatttttttgtatatttagtagagacggggtttcaccatgttagcgaggatggtctcgatatcctgacctcgtgatccgcccgcctcggcctcccaaagtgctgggattacagacgtgagccactgcgcctggcctcaagttttttttttttttttttggccaccttaataagtatatggtggtagcttcttctggttttaatttccttgtccctaatgactaatggttctgagcctctttttatgtgcatcttttgatttgccatctgtatatcattgtttatggaaaaatactaaaatcttttttttttttttttgagacagagtcttgctctgttgcccaggctggagagcagtggcacagtcaccactcactgcagccgccaccttctgggttcaagccatcctcccacctctcggcctcccaagtaactgggattgcaagtgcgcaccaccacacctggctagttttttttttttttttaatagagatggggttttgatatgttgcccagactgatttcgaatcctgggctcaagcgatctgcctgcctcggcctcccaaagtgctgagattacaggcatgagccaccatgcctggccaagataccaaaatctttatttaagatgtttaattgggttgctttctttattgttattcttcttttattttattttatttatttatttatttatttgagacggagtctcgctgtgtcgccaggctggagtgcagtggcgcgatcttgactcactgcaagctccccctcccgggttcacaccattctcctgcctcagcctcccaagtagctgggactacaggcacccgcccccacgcccagctaattttttgtatttttagtagagacggggtttcaccatgttagccaggatggtcttgatctcctgaccttgtgatcctcctgcctcggcctcccaaagtgctgggattacaggcgtgagccaccacaccaggcctcttttatttttttagacagagtctcgttctttcacccacgctggagtgcagtggcatgatcttggctcactgcagcctgtcattcccctcgactccaggttcaaggtgatcctcccaccacctcagcctccgaagtagttaggaccacagatgcatgccaccatgtgtggctaatttttgtatttttaatagagatggggtttcgctatgttgcccaggctggtcttgaactcctgagctcaagcaatctgcctaccttggcctcccaaagtgctgggattacaggcatgagccaccatgcctggccaatttcttactgttgggtagtaagagttctttatatattttggatataagtgctttgttaggctgtgtgatgttcatacattttccccatctgtgccttgtgtttcattgtcttagcggtgtctttttcccagagcataagttttaaattttgatgaagtctgattaaccacattttttcttttacacatttggtgttcatctaacagctctacctaacccagaccttgccagactttttctgtaaaaggtcagatagtaaatatttcagccttgctgtccctgttgcagctctgccattgtagcaatgaaagcagtcatagacaatatgtaaatgaatgataatggctgttccaataaaactttatgaacactgcagtttgaatttcacataatttacaaattatcaattatattgtttcgattattagaaaaacaggtagtggattggccatggtttgctgattcctggcctgacaaacccaagttcacaaagattttcctctttgattttgttgtggtcgttgttccacaccttcttttttcactgtttccttaaggtagagtgtacatatttataagggtacatgtaatattttgatagattgatacagtgtgtaatgatcaaatcaggttaattagggtatccatcatctcagatgtttatccttttttttgtattgggaagataacaaatgttctagctattttaaaatatacactaagttattgttgactctagtcaccctactgtgcaaataaaaactgaaacgtattccttctatcttgctgagtttttatgcccatgaatcaacttgtcttcatccctacctgcttcccagcccccggtaaccatcattctactgcctatctccatgaaatcaacttcttaatctctcatatatgaatgagaatatgtgatacttgtctttctgcccttggcctatttcacttaacataatgtcctccagttctatccatgttgctgcaaacagattttattttccaaaccttaagctttatagatgacttcactttttaaatggctgaataatatcctcttgtgcatgtatacctcattttctttgatttttctttctttctttttaaatagagatgagttctcactatactgcccaggctggtcttgaatttttttgctcaagcaatcctcctgccttggcctcccaaagtgctgggattccaggctaaaccactgtgctcctttatgcgtttttttgtttttgtttttgtttttagagacaaaatcttgctctgttgcccaggctggagtgcagtggtgcgatcttggctcactgaagcctccacctcccaggttgaaattattctcgtgcctcagcctcccaagtagctgggattacaggcacccaccaccacgcccagctaatttttgtatttttagtagagatgaggtttcaccatgttggccaggctggtctcgaactcctgacctcaggtgattcgtctgccttggcctcccaaagtgatgggactacaggcatgagccactgcgcccagcccctttgtgcacttttaaaaacatatcttagaatttgtgatacatgttttattttcattttcatttggttcacaatattgtaaaatttctactatgacttactctttgacccatgatttgttttaaaacgtattgtttaattttcaaacatttagggatttcccagacatctttgttgttggtttctaatttaattccattatggttagggaacatactcgttatgatgaattaaaaaaaaatgtagaggtttgtatatggcctgaaacattgtttgtttaggtcaatgttcagtttgtaataggaaagatgtgttctgctgccgttaggtaaagtgtttcataaataataattaggtcaagttggttgatcgtgttaaggtcttccctatccttgctgatttcctgtctgcttgttctagtgattactgagaaaggagtgttgaagtctgcaatgattgttatgggtttgttctctttctccttaaaattctgtctgtttatgcttcctgtattttgaggcactgttattagatgcagaaacatttacagttttgtcctcttgattatttgacccctttatcattctgaaataacctttatttctggtaataatcattatattaaaaaccattatttggccagacatggtggctcatgcctgtaatcccagcactttgggaggccgaggcgggtggatcacctgaggtcaggagttcgagtccagactggacaacatggcgaaaccccatctctactaaaaagagaaaaatagcctagtgtggtggcacacgtctgtagtcccagctactcagaaggttaagtcaagataatcacttgaatccgggagttggatattgcagtgagccgagatcacgccactgcaccccagcctgggaagcagagcaagactccatctcaaaagaaaaaaaaaaaaacaaaacaaaacaggcctggtgcagtggctcatgcctgtaaacccagcactttggaaggccgaggcaggtgaatcacctgaggtcgggagttcgagaccagcctggctaagatggtgaaaccccgtctctactaaaaatacaaaaattagccaggcacggtggcagctgcctgtaatcccaagtacttgggaggctgaggccagagaattgcttgaagctgggaggcagaggctgcagtaagccaagatcatgccattgcactctagcctgggtaacagagcaagactccatctcggggaaaaaaaaaaaaattacttaatattaatataaaattagtgttttatattagtagtataatactgtttttgactagtgttaaaatgacatatctttctctacccttttgcttttaatctagatatcatgatattcatttattttttaatttgtaaaaatagagatggggttttgccatgttgcccaggctggtcttgaattcctgggctcaagccacctgcccacctcaacctcccaaaacgctgggattataggcgtgagccaccatacttggccatatcattatattttcaaatggtttcttgttttttcgtttttcttttaaatgtaatctgacagcgtcttttaattaatgtgttttggaccatttacatttaatatgattgatgatgattggatttaggtttcctttttattatttgttttctggttatttcttttttggggggtttcttctgtttcttttttctgcctatttttggattaactgaatattttttagtgttatgttttattaattggcttttggttatatctgtgctgtgtttttgctgtaggaattacaaaatatatacctaacctacctacttagagttagcattttacctctaaataaaatgtaaaagtattgcaaacatataggtttctttattctagcccccccttataattgtatatatgtgtgtgtgtatgtgtgtatatatctatatacactttcaatgtatgtagatatgtatctatactttcagtgtatattatatctacatgcatacattgtgtatgtatgtagatgtatatctacatacattgaaagatatatatctacatacatatacaatgcatgtatgatacctttggctactacatccttcttaaatttcctgttgccacttatgacctgatttccttgaccagttattcctccttcaaacatccctcttacatgtgatagtcctcagcatttagtttccccaactttcccctaattatcagttgactcaattaccaccaaaatatcaatgacttttttgagacagagtctcactctgtcaccaggctggagtgcagtggcacgatcttggctcagtgcaacctctgcctcctgagtccaagtgattctcctccctcagcctcccgagtagctgggaatacaggtgtgtgccaacacacccagctaatttttgtatttttagtagagacggggtttcaccatgttggccaggatggtttcaatctcttgaccttgtgatcagcctgcctcaacctcccaaagtgctgggattacaggcatgagccaccgcgcccggccaaaatatcaatgacttctagatccattttcctacctagacctcttttctaaactccagatatatatttccaactgcctgtgctgtccgccataaactccacattgtaggaaatagaaaggagttataaaagtttaggttcaaagcaaaatttaaaaactcataaatgagacaaaattttgtgatgataaaggctatggtccacaatgaagatatgaaagtaatgaacctttctataaaatgtataggtgatagagctggtccccaactttaagcctttcagcgattcaagtaactacagaacatcgttaaagtactgagagaaatgtcaatccagaattctatatccagcaaaaatacccttcaacaattaaggcaaaaagaaaaagaagaaagacattttggatgaagaaaatctaagagaatgtgttggcggaagttctgctctaaaataaaagtaaaagaaggtctttaggccaaaggaaaattataccagtggtaatactagaacttcagagataaagagcagcagaaatggtatctgggaaaatttaaaaatgcaaacggttgtttctcctcttaagctctttaaaatatgtatagtggttgaaagcaaaagttaaaacactgctgagactttcaatgtatgtagatatacgtatatatatctacatatatatacatatatatgtatatacatgtagaggtaataatggtagctattttatggagctgatctgaggataaaatgaaagaatgcattttaaagtgcttagcacaatgtctggcaaatagaaagcactctataggccaggcatggtggctcacgcctgtaatcccagcactttgggaggcctaggcaggtggatcacttgaggtcaggtatttgagaccagcctggccaacatggtgagaccccgtctctactaaaaatataaaaattagccgggtgtggtggtgggctcctgtaatcccagctacttgaagtgaggcaggcgagtggcttgaacctgggaggtggaggttgcagggagccaagattgcaccactgcactccagcctggtcgacagagcaagactccagctcaaaaaaaaaaaaaaaaaaaaaaaaggtggggggacaatgttactcttcttccttctagaaacatacattttatagaagttgttttttgaagtctagaagtctgaaaacgcaggagtcaactctgaaaaatctacagtggtttctggggttcaatcttggcatgactttacccctgcatctctgccctcagcaggtagttttgtttatgggtgtcattggttgaacagataattgttttagttgctacaataaataaaacatgatctgtgctctaaaggagtcaacagatgagccaggggggcatgagtaattgcctgtaatataattgtgctcacgctgtcatggaggaccgtacaaagtgtcagaagcacagtgccaggaggcacagcaaagggtagtagaggtgacatttgagcccagccttgaaaactgtctaggatttctcagcatttcagcaaagtaaggcaatttctgtctaaaatatataggcaaagtttttataaaaatacgagaaattaattaaataacagattatgaccacaatgcagatttaaaaactaaggtatgatgagtgccgttgaccggttcatccagacagttcagagaacagaacatccatgtagatccttcttgtattacagaatacaaaggagcggaaaattttgcctcagtaactgccaggtcattctaattaaagtacctatacattgtaatataattcctccattaaggtaacagccaatcaggtggtacagagtctgtgccattcagtcaagaaattcactcccttaacctagactgtgctggaagttcattgacaaattttgttctttggttctccatttttcttcagaattcatgcagaccacttgacttccttagcattttcttttgtgggcgtatattaatgtctttggttaagcttcagcttccgtttgcatcaatcctgttgtaatcgtgcctcctgaggcatctttttgcttcccttgcatcagtttccaaaatcctactttctgcttggtaaggggagtatccattttctttaaagcagtggttttcaaacttgcctgcacatcagaattatttggggagaaggataaaaatacagattactgagcttcacctgggattctgtagatttgagttgcatttgggattactttaaacaatttaccagatgatttttgtggcacctccacttcagttttaggaaggactgtttcgaggcagcttttcaaactttaatgaccatagaaatcacctgaagattgtgagaaactgcagatcctgatttagtaggcctgggtttaggcctgaggttctgaatttctctgaaatgtgataatagcaaatcccttgttgagtagcaaggttgttttttgtttttttcttttttttccaatatcttcatgacattcaatgagtagcaaagtttgaagataacttctggaatttcatctaatgtgtattaatttttactcatctggatcttaggggaaataacctatcagattatagggaagtgtttctcaaagtatggttccccaaacagcacaacctgggaattgttagaaatgcaagttctgggccgggcactgtggctcatgcctgtaatcccagcactttgggaggctgaagcgggtggatcacctgaggtgaggagtttgagaccagcctggctaacatggtgagaccccgtctctactaaaaatacaaaaaaaattagctgggcatggtggtggtactttttaaaatttttttagagacagaatatccctgtgttgcccaggctggtctgtaaatcctgacctcaagcaatcctcctgcctcagcctcttaagtagctaggtacaagccaccatgcccagctatattgacttgtttttgagacggagtctctgttgcctaggctggagggcagtggtgcgatcttggctcactgcgacctccgcctcccgggttcacgcgattctcctgcctcagcctcctgagtagctgggaccacaggcatgcaccaccatgcctggctaatttttgtattttagtagagatagagtttcaccatgttggccagactggtcttgaactcctgacctcaaatgatccacccgccttcgcctcccaaagtgctgagactacaggtgtgggccaccacgcctgaccatatatttacctttatgtgaatttaaaatgtgtgggcgtgaccaagtcgtctgccggctgttatataaaggagactttatcatcaacatgctcatcatcagtcacaaactgcctatttggaactcccttcagttctcagaggatggaaacattctttaagcggccttgtagaaatcctattccatgttaacatgccaaccaattttactttcccagagccacagaatgatatctcattgtatgcctcaattcaatcacctttccattttcaaggaccgatttcaattcctgattggctacttgatctgactgcttcctgctaatcttgttgcctattgtctatattccatttctcattgaattaaccttgatcaaatctgagaactctgcttagtaatgactccaggtatactatacccacttttgtagcttattcaacaccctcttcaatcctggttccacttcctgtgactgaaatgattacctgtgaaatattatttaacttttggacgatgatgtgtttctaacctgtgaccatttcacatagccactcaaatatggtaaaggtatggtaaagatgatgaaacagttacttggcatcattttgtaagtaatgagtttttagtgcgctttggaccttgagaccacttcataagctttagattttgagaatttcacagcataaagctcatcgctgatgcagtaatgaaggaaatgttctacaagttaatagatgagtgagaggagagggcattcatattagatttatttacttactgaactcagagccttgggttactacttgacccccactgttatctagtttaagggtccttttattttttgttttttcgaggtggagtttcactcttgttccccaggctagagtgcaatggcccggtctctgctcactgcaatctctgcctcccagattctcctgtctcagcctcccaagtagctgggattataggtacccaccaccacgccctgctagtttttgtatttttagtagagacagggtttcaccatattggtcaggctggtctcgaactcctgacctcaggcagtctgcccacctcagcctcccaaagtgctgggattacaggcatgagccactgctcctggccttaagtgttcttttctactttagcacatacacctagttgctgtcttttttgctttttataaatacagaaaagagaataatgttttaaaatcaaggaaaggcctaaggcacctgtgagggttttttgtttttgtttttgtttcagtgaaatgaagggaaatggtcaccagcaagaactgtggcaatgttatccaaggtgacaactgtctgtaccacccaggggctcagagcccttctgaagtttcctagatgttccgaaagtctccactgtgactcatgttacaggctggtctccgtggtagcactcaacgtttaaaaattagtcttcattgccaggcgtggtggctcacgcctgtaatcccagcactttgggaggctgaggtgggtggatcccgatgtcaggagatggagatcatcctggctaacacggtgaaaccccatctctactaaaaatacagaaaattagccggcagtggtggggggcgcctgtagtcccagctactctggaggctgaggcaggagaatggcgtgaacccgggaggcggagcttgcagtgagccgagatcatgccactgcactccagcctgggcgacagagggagactccgtctcaaaaaaaaaaaaaaatagtcttcatttctccttcccaacaagcgtttctctttctcttcagtgggaaaaagtaatttcattttttacttgctcattgttttattcattcactcaatcaacagaccatctatcctgtattgtatgccaagaactgtgctttgttctgggaatgaaaaaagaataagatatgttttcctctggcacttatggagcttataaaccagtgacagaggaaggtgcataaacaaatcaacaaagaattaactttactattcttattaatttctaatacaataaatttgactatttgtatcatttgagtttcatgaatataatcatattctacacttacaaaatgaaatagacataagaaagaactggtgatgtaagaaattcacagaaatgtgtaaaatatttcaagaattaacactcagtagatatttgcattgtcaaagaagcttatacatgcagatgaacctctagttgttttagttgcttgtaaaatgtatagaggtatgtgtatttcctctttaagcaggggtaacttggggtgggggatgggtgggttcatcttatctattcttcaggtcatgttctcaagaaggagctactgaatgggaagactgaaacaatttcttttctttgcacagttggtattgataaatctcaggtgtatccaaaataaaatctctggcaggctgtgatatttgtgggtctgtctcttgtgactttaggttcctcttggcagcagacataaggcagttgcacatcaggcccttgcctgaaacagctcctgatgccaagaactggtgaattactactttggtttcaatggatggtcagaaaggatcatcaggataaactttgtggattttctctcactaaccacgctctcctttcaacattgaaattctagactttagacagaagtattgaactgggttacagggaggggatgtgagaggccccctgccattgaggataagtggacatgtctgaattggcctgctacctaaaattaataatctcaatcacttggatggtggtgtccataattttctccactgtttgtgtggcatataataagtaatggttgcacctagcaattcatttacaaatcttacttgattttgaagccatagaacacctcaactgttagcttgaatgactggagtttagtttttatttctcagaacaaaacagtttgaagcctaattaacatcctcggaaggaacttaacactaaaactcctaacagcttcagttttctgaccttgaagaaagggaaaatgaagagaccatggtgccacttccgaagcaaagcctgaagttctgtgctttagaggtggtgttgccatcctatgattgcaggagtctggccttggcttggtggaggagcctgtggataaggcgaaggaaggtctgttttcattgggggtagaggagggtaaggagttgaaatgggaaggatctcttttttcttgctgtctaaaacttgtcttttcagacacatatcaagcctttccctctctgagctactgaagtcctgggcagaggttttctgtcttacaatacagacttttaccttaggcaatacctgacagagcctttaaataagtaaataaattgctttaataaattgatttaatacattgatttattaattaataaattgatttaatacattgatttattaattaataaatttatttaataaattgatttattaattaactaattttgagagagagtcttgctctgtcaccaggctggagtgcagtggcgtgatctcggctcactgcaacctccgcctcccgggttcaaggcattctcctgcctcagcctcctgagtagctgggattacaggcgcccaccaccacacccagctaatttttgtatttttagtagagatggggtttcaccatgttggccaggatggtctcgatctcctgacctcgtgatctgcctgccttggcctcccaaagtgctgggattacaagtgtgagccaccccacccggccagaacctttaaatttaaaattgtacagtgtacttcctgccaagaagcgtaggaggaagaaggaagtaatgtttttccagttttcggttaagaacttgctttgtattaaaatagtccttcaagtctacagccataccaccctgaacgcacccaatctcgtctaaaatagtccttcaaatatgtatctcttatagccttcagttatcccaacaaaattatctaaagatttgtttatctatttattattattttttagagacagggtcttgctctgttgcccaggctagagtgcagtagcatgctcatagctcattgcaacctcaaactgctgggctcaagggatcctcccaccttagcctcctgactagccaggactacaggcgtgtgccaccacatgtggctaattattttttctggagatggggtcttgctgtgttgtcctgcctggtctcaaactcctggcctcaagtgatcctcttcccccaggatcccaaggtgctggagttataggcatgagccacccaccatgccaagtcatcatgtaaagatttacagaaagttttgtgtaaacattgtcttttttttttttttgaagcagagtcttgccctgtcgcgcaggctggagtgcagtggtgtgatctcggctcactgcaacctccacctcccaggttcaagtgattctcctgcctgacactcctgggtagctgggattacaggcatgcaccaccatgcctggctaatctttgtatttttagtagagatggggtttcattgtgttggtcaggccggtctcaaactcctgacctcgtgatccatctgccttggcctctgaaagtgctaggattacaggcatgagcaaccgcgcccggcccattcagccttttttttactcgtagaagggcttcagtggaacaagagtctactagagatactagaaagggtactcaattgataactgacgttgagatttttttctagtattcatggccctcaggcttagggtttgaagtcagaggcagggctgtaggctaatggaggggagtaggctttcatggatgatgcccagggaggagccagattatctgtaccaaaccttttttgtttttttgagacagagtcttgctctgtcgcccaggctggagtgcaccggtgtgatctcggctcactgcaacctccacctcccaggttcaagcagttcacctccctcctgcccaccaccacactcagccaatttttaatttttaaaaaattttttagtagagacagggtttcatcatgttgctcaggctggtctcaaactcctgacctcaagtgatctgcccatcttggcctctcaaagtactgggattacagatatgagccactgtgcctggcctctttttgaaaatagtcttactctgtcacccaggctggagtgcagtggaatgatctcggctcactgcaacctccgcctcctggttcaagctattcttgtgcctcagactcccaggtagctgggattacaggtgtgtgccaccacactcggctaatttttgtatttttaggagagatggggtttcaccacgttggctaggctgttcttgaactcctggcctcaacccgccttggcatcctaaagtgctgggattacaggcatgggccaccgtgtccagccaacaaagctttttttcagtgagtgattccagcccttgatgcataggagggtggggtccataggagtgtagccttaactgatgaattaaatctctgggtgatgtgagatatgtgccaggttcttggcttatgtctccctctagtactttaggaacttcccaactagatggaggcagtaaaaatgggccctgccaggatgtacctataacagagacgttcaaccatacccttgtgctgtctgcctttaatcacgaagattatgagctaagattcgtggatgcatttttattttttaaccaacatgtagcaatgatcactcagataggcatcttaaatccattagtttgggttggatttaagaccgttgtcattcctatgaaagggaagatagcccagattgctattgagaaggctttgtcagatgcattccagaaactgttgattgtggttctaggtaaaactttcttaatcgtcgttgaagtacttcagtttcagtgagcaaataaactcattttgaaaagttaattggataaaaatatcgatatctaaaacactccctaggatgctttcatttgctaagttctttcacagcgacaggctcaaatttgttctttgtgacatttgtagaaaaaatgacagcaaatattgtccctagtttatagctataaaaggacttgcctcaggtcacacagaaaatgtttgaggcaggtcttctttaattgcatgcctatcgtacagaatagtgattataagccctggacacatggatttgagtcctaactctgtctcttagatttttgtatgcagttttaggtcttatggccagagagatttgaagatatttaatatctctaagctgcaatctttatctgcaaactggggttagtaatccaatcaaccttattgctgatattgtaagaaaaaatgagatgacaagtgtaaaaactcagaactatacttacaaggtaagcagacaaaatatgctattgttgtgattgttttctctctgaataaataaactctgctgaagaatttattagattatgtttctcgaatcgagaattcagttccagctctcatttctggcactgacatattggccaaatatgattcttatacaataatcagctgctttgctgtgagccttggaagtggtcatgctgttgaatggcactgcttgtatttcctattcagttctacagtggcacaaatgtcatagcctgtgcccaaaggaaacctggtgtttaacgagtccctgaacagagttgcctttctgcttcacaaccctgaaggcttagagactgagattgtaattaagttactacagacctttatttgcttgtaagaggtggccctgattgctctcagctttccaacctgggcagcccttctagtgaaagtcttacttccttggtcatcaactgtcaagtctgagtaatgacatttaataaccaagctaaatgtgtgggttgtctacccctccctagtatgcaaaggtatcccttgcacacactcacttcttagaccaaaagccttatagttctagtttgccttgaaggaaattgtattgtctatagagtatgtgggccattttctgcccgtaaaatgttcaaatgttttctctctctaaagctttgttcattgtatctggtggaattttggttctcagggagtagacacctagccatgcttctaatgtgaagtgtctactagcccagtggtctctattttggatttgaacttacttcgaccccccacctggtgccttaccttttaatcatgttatgattgaacatttttatttccacattttttatttcttacgttattattccttagttcctatctgtaagatcataaagtcctttgaaccaaacacagttgatatttcatacatatgttaaaaactgagctgtgagaccagacatgatgactcacgcttgaaatctcagcatttcgggaggccaagacagaaggatcacttcaagccaggagttcgagaccagcctggaaaacaaagcgggaccatgtctctaaaaaagagaattagacgggcacagtgatatagtgcctgctactctggaggctgaagcaggaggatgacttgagcccaggaattccaggctacagtgagctatgatagtgccactgtactccagcctgggtgacagagtgagaccctgtctaaaagaaaaaagaaaaacaaaaatcgaagtgtatgatgaagagatgaggaaactttcaggaaaatgcttatttcctgcttttagaaactaaaagaatgtctcattgtgggttgctaccattatatgcaggaagttttggaatgaaaaagattctgaattcatccttgctaactttatttcagaaagtggtaaaatagctatggagtacagacccagtgaagagattgtagatgtcagatgggaagaagaactacacggtttaatataagtatgtggagataaaaactcaaaggtaacagggccgggcacagtggctcacacctgtaatgccagtgctttgggaggctgaggcgggtggatcacctgaggtcaggagttcaagatcagactgaccaacatggagaaatggtggcacatgcctgtaatcccagctactcgggaggctgaggcaggagaatcgcttggacccgggaagcggaggttccggtaagccaagatcacaccattgcactccagcctgggcaacaagagtgaaactctatctcaaaaaacaaacaggccaggcgctgtggctcacacctgtaatcccagcactttgggaggccgaggtgggtggatcatgaggtcaggagttcaagaccagcctggccaatatggtgaaaccctgtctctactaaaaatacaaaaattggctgggtgtggtggtgggcacctgtaatcccagctacttgggaaactgaggcatgaaaaccactagaacccaggaggcggaggttgcagtgagccgagatcatgccactgcattccagcctgggtgacagagcaagacactctctcgaggaaaaaaaaaaaaagaaaagaaaaacaactcaagggtttgataacattgccagtataaccataattcaaaacaagcagcagaatttggaggataatttgtttaattctcaggaaaatgtgaaactctgaaactgctttttgagtgcagggtatttccggggcttttcctaaagtcttaacccttggctctgaccccttatttgaagtttggagagcagaaccgaggattgtattactacagttgtggacacaggagaggggttagtctccccccgctccaggagtaagggatgctgggctgctcgaacacaggccttgttagaactcccttcaaacaggatcccagagatgtggggagaaggtaactggccttaagaatgattgcgctacagcttttgaaaactataatgcctttcaaatatggcttattgcttggatctcaatatctcccacgtatcttgggtggaatattttgctgaagatctttctgtcaatcatttacaatcatgtgctgcaaaatgaagtttgcgtcaacagtagaccacatatatgatggtggttccgtaagcgtataatggagctatccctatataggtataccatttttatctttttttttttttttttttttttttttttttgagatggagtctcactctgttgtccaggctggagtgcggtggtatgatcccagctcattgcaacctccacctcccaggttcaagtgattctcctacctcagcctcctgagtagctgggattatagacacgcgtcaccacactcagctaatttttgtatttttagtagagatggggtttcatcatgttggccaggctggtcttgaactcctgagctcaagtgatccacccaccttggcgtcccaaagtgctgggattacaggcatgagccactgtgcccaggccccatttttatcttttacacagtattttaactatatattttccatgtttacatacacaaatacctgccattctgtgacagttgcctttagtattcagtacagtaacatacagtacaggtttgtagcctaggagtcctaagccataccgtgtaccctaggtatggtggctacaccacctaggtttgtgtaagtatacgctatgatattagcacaatggtgaaatcacctagtgacccatttctcaagctcctcacgtggcaagcaatgcatgactgcatatgaaagctcttaaatagggattgtttctaaattaatctcaaaacagtcattatttactatttatggaattttttttaaaaaaaggagcaaaagtatcatttcagtgggaacttaacttggggctacagtgttttatttaacttttaccccaaagttgcaaagtgttttgaaatttttccctgtaaaataattattttaattcaatttaaataaaacccaccaaggagacttcaagctttaagaagtctagcttcctgtgaaatgtgagaggaagtcagcactcatttcagaaatctgattataacaatagctccatccctaaatgaggtgaatcttggaatctcttccattttattttattttatttttttgagatggagtttctctcttgttgcccaggctgaagtgcaatgttgtgatctcggctcactgcaacctctgcctcccaggttcaagcgattctcctgctttggcctcctgagtagctgggattgcaggtatgcaccatcacacctggctaattttgtatttttagtagagacggagtttcaccatgttggttaggctggtctcgaacttctgacctcagtgatccccccacctcggcctcccaaagttctgggattatgggtgtgagccaccacacccggccccccttcaattttaaagccatcactatgcaccctatgtctatgccaggcactaaaataagatgaagcaccttcttggagtttacatgctggtaattatgccagacagtaataaaataggtaagaacggctgtgggggaagtcagctgggttctagttacagtcgcatttcaggaaatgatttaacatgctgactttaacaacctaagcctcttctccatgtgtgcacacagggtagatctctgaacacaggtgaccctagaagtgctgtaacttctaggggaatggctgtgttgagtcaaggcaggatgacagttcagcctcctcccaggctagtgcaaagggctcttcactcggattaaaaccttctctcccagaccgaattgccaactcccaacacccctcctacagaaaatgtggagtcctcgcttattccctggcagcccctacctaatagggtggtgaattaattatcaaacatgcgacagtttagcgaaaatggcaacactttggaataagtgactgtaatgtgcatcctggcgcccattttgcaggtcagttgctctccctggaaggaagagtgttctcggatttcaccttaaaggaggaaggctgccagaactgaactagcacttctgaatatcctgaggcgaggtccggtgacttccttgggaagctctgccgcgcccccaccccaccctaccccaccctaccccaccacagcaggcgctggagtcctgggaccaccagggtctgaggcccaaatccttcctcactaaggggaggagaggggtgttccggcagggcaggatgggaaggcgtgcttgggcgggattgtgacataagagtgccctggtgacatggagcagatctgtgacataaataaaggtgtcataaagacagggcggggctcacgcttagaaggggcacgagcgtctcggagctgccagaatgtcttctgctcagtgcccggcactagtgtgtgtcatgtcccggctgcgtttctggggcccatggcccctccttatgtggcaactattgtggctactagttaaggaggctcagcctctggagtgggtcaaggacccgctccagctcacctctaatcccctggggccgcctgactcctggtcttcccactcctcccatttcccacgggaatctccccatgcgcctactctcccagcagacccgtgggactttgatcacctggggccctctgcttcctcagagatgccagccccaccccaggaatcgactgaaaatttggttccattcctggacacctgggattcagctggagagcagcccctggagccagagcagttcttggcttcacagcaggatttaaaggacaagctgagtccacaggaaagactccctgtttcgcccaagaagctgaagaaagatccagctcagcgttggagccttgctgagattattggaattacacgccaattatccacacctcagagtcagaaacagactttgcagaatgaatattccagtacagatacaccgtatcccggtagcctgcctccagaactccgggtgaagtcagatgagcctccagggccctctgagcaagttggaccttctcaattccatctagagcccgaaactcaaaatccagagacccttgaagacatccagtcctcttcactccagcaagaagccccagcacagcttccacagctccttgaggaagaaccttcttcaatgcagcaggaggccccagctctgcctccagagtcctctatggagagtctaactctaccgaatcatgaggtgtcagttcaacctccaggtgaggatcaagcttattatcacttgcccaacattacagttaaacctgcagatgtggaggttaccataacttcagagcctaccaatgagacagaatcttcccaagcccagcaggagaccccaattcagtttccagaggaggtggaaccttctgcaacccaacaggaggccccaattgagcctccagttcctcctatggagcatgaactttccatcagtgagcagcagcagccagttcagccttctgagtctcctagggaggtcgaatcttctccgacccagcaggagaccccaggtcagcctccagaacatcatgaagtcacagtttcacctccaggtcaccatcaaactcatcatttagcttcacccagtgtctctgtgaagcctccagacgtgcagctcaccatagcagcagagcctagtgcagaggtgggaacttctctagtccaccaggaggctacaactcggctctcagggtcaggtaatgatgtagaacctcccgccatccagcacgggggcccacctctgcttccagagtcatcagaagaagctggacctttagcagttcaacaggagacttcatttcaatctccggaacctattaataatgagaacccctctccaacccagcaggaggctgcagctgagcatccacagaccgctgaggagggtgagtcttccctaacccatcaggaggccccagctcagactccagagttccctaatgtagttgtagctcaacctccagagcattcacacctgactcaagccacagttcaacctttggatctggggtttaccatcactccagaatccaagacagaggttgaactttctccaaccatgaaggagaccccaactcagcctcctaagaaagttgtaccccaacttcgagtatatcaaggggtaacaaatccaacaccaggtcaggatcaagctcagcatccagtgtcacccagcgttacagttcaacttttggacctgggacttaccatcactccagaacctactacggaggttggacattctacacccccgaagaggactatagtttctccaaagcatcctgaggtgacacttccacatccagaccaggttcagactcagcattcacacctgactcgagccacagttcaacctttggacctggggtttaccatcactccaaaatccatgacagaggttgaaccttctacagccctgatgactacagctcctcctccaggacaccctgaggtgacacttccaccttcagacaagggtcaggctcagcattcacacctgactcaagccaccgttcaacctctggacctggagcttaccataactacaaaacctactacagaggttaaaccatctccaaccacggaggagacctcaactcagcctccagacctgggacttgccatcattccagaacccactacagagactagacattctacagccctggagaagactacagctcctcgtccagaccgggttcagactctgcatcgaagcctgactgaagtcacaggtccacctactgaactagaacctgctcaggattcactggtgcagtctgaaagttacacccaaaataaggctttaactgcaccagaggaacacaaggcctccacaagcaccaacatatgtgagctctgtacctgcggagatgagatgttgtcatgtattgatctcaacccagagcagaggctccgccaagtgcctgtgccagagcccaacacccacaatggcaccttcaccatcttgtaagaatcacttttcctcaattgtcctctgtgtcctgcctgacatggcagccttttcctggaggccttcctgggccttctttatctccccaagccatatggacaactgactttctgctttcacctttgcttgtcaactctcccttctcctcattctcttttaatgttaggccccttctccagtcttttccttttactctggtcttttactcgtttttgtatccatttttatttagccccatcacatcattgcttaaccgctgctctcctcccattttcgcttcaccctctttacagcagcctgtccctctcccgatctcagtgatgatgctctaagtggttaagagttgattccggagccaggctgcctgggtttgaacccagatctatttattagcttggtgacccagagcaagttattctgcctgtgactcaatttcctcacctttaaactggggatcatgctagttagcatttcataggattgttgtgaaatttaggtgagtgaatatatgaaacacttcatcagtgcttagcatatgtaggagagttggctgttcacatgattattcagtcctttagttttgtccagaactcatttttgtccctagctttctatatgtagaactagttttatgtcaaacccagggccaagtatgctactgtctccagaacacgaaaatgataggagggaagaggctgggtgtggtggctcacgcctgtaatcccagcactttgggaggccgaggcgggcggatcatgaggtcaggagatcaagaccatcctggctaacatggtgaaaccccatctctactaaaaatacagaaaaaaattagccaggcatggtggtgggtgcctggagtcccagctactcgggaggctgaggcaggagaatggcatgaacctgggaggcagagcttgcagtgagccgagattgcaccactgcactccagcctgggcgacagagcaagactccatctcaaaaaaaaaaatgataggagggaagaaagagaataggcataaaaagggaggtatatataattaagtactaaaagataatgcagaccattggtgctagaatttgccagaatctgtgatccttgaggtgtggagatgctacatgggtaagctaaaactttacttgggtcttaaagagtagccataatttgttaaataggagaaaaatgggagtacagtctaggcaaacgcatggctacaggtatggttggaatttagtagaccaatgtggctacaaagaattaggtgagggagcaatgaagatacgattctgtaaaaccttgattatcagctacaggagtttgaaagttacacaatgaggtatggaaagccattgaaagtttccaagcaagagagattacatgatcaaaacaggaagattattttattttgttttttgcattatgtgcaagtgtagacatgcagaggattgttttagaatccatatgtaaagtgtccaaaaggaaaagcttaattcagggagacaaaatagaaaggtctagcaaaatctaggagtgaggtgtgaaggggccaaatcagatcagttgtaataggagtggaaagaaaaagcctaggatgtttcaacagagggcactgggccaaagctttggtgttacctggcatagggtttctttcttctcatttgttgataatgataagcttttgcccatatttctgtggaattatttaccattttggtactgatttgtagaagtctgtttagacacataagtgcttttagataaaatacttacattcaaagtaattaactggcatcatctgtccaagagatgggatggataagaagttaagcttccaggagatgcctcatcatttgtgccggtgaccccgcataatttcttgatgaattgtgcaaactgggaagctgatagctctggaaatgagaaagcaggtgttattttctgtttctgaatatccccaacaagattgcaatgattcttttacttatcgtgttcattgttttcctacctattcaaggatataaactgtgtttcttcacagaaatttccaaggaaactatatttcttacattgatggaaatgtatggaaagcatacagttggaccgagaaactgtgagtatattctctccaaatatgacaaaaagctaactgcattgtaagatccttcttggtccagaattttgaggtcggtacctctgaggaaagatatttctcctccacgccccaaatcaaccactgttgattgcaattgtatggttattttaaaattaaatttggtaggctctctttaaaataagaggcaatttaaatttattttttatcatacaaatagtacatggttatattcctttttgttctctttttttttttttttttttttttttcagagacagggtcttactttgtcctctgggctgcagtgcagtggcacaatcacagctcactgcagccttcacctcccaggcccaagtgatcctctcacctcagcctccccagtagctgggaccacaggtgcatgccaccacacccacctaattttgtattttttgtagagacagggtcttcctatgctgcttaggctggtcttgaactcctgggctcaagtgatcctcccaccttggcctcttaaagtgttcatattacaggcatgagccaccacccgcagcccatgattccatttttaatatataaaaatgcaataacagatataacaaaaactctccttgtgccctactccctcatccctgaagtaatgctactctgcatttagtatacatgcttccagacttttcctcatttacctacatacatatttacataaagcaaaatagatttgttttgtggttttaaaattttttcttcgcataaagggtaacatcttgcaacttgattctttcacttcatgatatgccttagatttctttccttcccagtactgagagggtcaccccattcatttaaactcctgcataatccatagtatggatgcatcatggtttatttaataattcccccattgatgaatgtttagattatgcttagttttcttgttacatgcattgctgcaatgaaatccctgtacatgcttctttgtgaacatgtgcaagtattcctgtagcatagatatctggaaatggaattcttggggtgaagactatgtagatataaaattttaattgccttcaaaaattttgtgccaacttactctattgtcagcagaatatgacagcattcatttcccaacaccttttcaccgctgggtattctccaactttttgctgaagttatggatgaataaaagggattccatctaaatgtgaatttttctgattactcatgaatttaatttagtatctttatatgtttattgaacatttgtgtttcttctctgagttttctggcctttgttcattttcctgttgaattgttttatcattttcttactgatttatagaaggaattggtttagacacataagtgattttggaaaaaatgcttacattcaaagtaactgacatttttcacaacagtttgtgtgtcacatcattattccaatgtatatagacaagccacgatgagttctaaattaaaaataaacatatgctaggcgcggtggctcacgcctttaatcccagcaccttgggaggtaggcggatcacctgaggtcaggagtttgagaccagcctggccgatagggcgaaaccccatctctactaaaaatacaaaaagtagccaggcgtggtggtgggtgcctgtaatcccatctacttgggaagctgaggcaggagaattgctttatttattttttcagatggaattttgttcttgttgcccaggctggagtgcaatggtgcgatcttggctcactgcaacctccacctcccgggttcaagggattctcctgcctcagcctcctgggtagctggaattacaggtgccctccatcacacccagctaatttttatatttttagtagagacagggtttcaccatgttggccaggctggtctcaaactcatgaccgtgggtgattcacccaccttggctttccagagtgctgggattacaggcatgagccaccacgccaggccagaactacattttaaaaacaagaaaattattacaaaggtcaggatagtggttacctattagggttagagagagggatatgattggaaaggggcacactggggcttctggcatgctagcaatgatcttttgtaacgatgtttacatgggtatctgcttcataattattaaactgaatattttggccaggtgaggtggctcatgtctgcagtcacagcactttgggaagcagacacaggaggatcacttgagccaggagtttgagaccagtctgggaacagagtgagaccctgtctcaaaaattaaattaaattaaatataaacaacatttatgttatgtgcactttatgcacattatagttctccagtttttttgatggggggaaaaaggttgaatggcttcacttgcagccctgacatggttccatgtggggctttcataataaggtttgggaaaagagaggaggaaatggaggttctgctgatcttggtgccacccagagttggattctaaaagggattttgtgatctagagaggaggcatgaaataacagaatttggtgggaagaaacccactcttcaaggggtgtgcttgagtgtgtgtgtgtgtgtttgtggtggtggtggagagagatggacacaaaaaggaaaatataagaaaaggtttgaatgaaagcagagcagatcccaccatcttgaagtgaccatgacccagctttcctccacatgcaggagatggttctgtgtagcaaatagttgtagtttgcattttaatctagaaataacttcttcattttccagaattctcagagaaaataacttgactgaattacacaaggattcatttgaaggcctgctatccctccagtatttgtaagttagttaattatatttatgagtttttagtcatattatctgtaaaatgaataaggggttcaaattagataatctctcagatttctttgagcaataaaattctgcaattctgtaagtttgtatagggtctcagcccatctctagcactagctacctcctgtgcattttcagtttttaagttgtatagacaaaatacagacaaaaacatttcacatggtaagaaaatctgagcagtgactgacacccatatgaaccttgttttataagggttcacatatcattctttttctattcagtctacaaccaatagatccaatctaatttatggtctatttttaaatagcccattaagttaagaatgggttttgcatttttaaagggactgtgaaagaaaaagaaaagaaacaaagaaatatgcgagagatcatatgtggcccataaaacctaaaatatttactgtctgaccttcaccaaaaaaaatttcaaaaagttggtttagtaggatgaaaggaactaaagttaacttcagatggttgcctaaaggagaagaaaatggagaccacctgcattcatttgaacatcattaatccagaattttttggtaatttaatcggaattaaattaacatttaaatattaaaaatagctgaattatatcaatattatcatcaagaatattaagctaccaagagaatagactggtattaaggatttcatttcaggaattgttatattaaaacagatgtttaaaatgatggttaactggtagagctagaaatgtttacactaagaagcacatcagaaatgcccctaactcttcactaattacaaaataacgatcgccccagccctgttaccaagaaagggatccctgtatttctgtctgtttagagacaagaagatactatgttcattgctatgaatgcttgattcttaccctttgtccatagaggtgtgtatgtcattaatccttattaagctcattagtgatgctcttttgcaaacagattctctcaaatatagaaggcttaaggaaagtgggtgtaaagaccctcaggtggatgccaaagtgctacagagaccatgaaataataaaactacgtttcctttaaaatagttattttccttctactcactcccccctattcatttattttacaaatatttgagtttgctttatttccatgtgtcagttttaaacatggtgggcaatgcagatgagcaagacctagtccatgctttcagggacctgtttatgctcagaagaaatgggatacaaaataactacattaagaagaagaaatggatgtgggcactaggagggataaattgtttctcgaacatagaagaggaaaaaatgccttcaatttggacccaggaggatgttactagaacaatgccatttgaataggactttaaagggccattgtgtaacaccagacagacatcttggggaaaatactctaaacttgcaaaaggaaaatgggagggcaaaacacaggaaagtattcaaggaatgccatgagtacccgtagagtacaagaagggagagtaggaaaatggagccagatcttctagagctttgaatgccaagctgaggagccaacatggggaaccgtgttaccacagcagcgctgtaaggtagatctgcatcacagtcattgagagggcacgttagaactcagttctggactccaccctcgtagttactgattcagttggtctagagtgggaccaagaatttgcatcttcagtaatttcccaggagatgctggtctttgcaagccacttctggagagtttatatgatgactgtgtgcaggatagtttaggtagggagagactagagatggagacatcagccagacaacgttacaccatccaggtaaagagggagggacaaactccatcactgtataactgaagaaatttttttttatgaaatattaaagcaatacaaaaccaaaaatgaatttctattaatatgatagaaattaattctattaatatgatttgaattagttcaaagttatgtattaggtaaaggggtagcttcctttcaaatgatgtgaaaggatgtcttttatttcttctgatattgaagtggcttaggaaaacagacctaaactaagaaggtgtagaaatgtgagacttgtttgtttgtttgtttgtttgtttgagacggaatctcgctctgtcgcccaggctggagtgcagtggtgcaatcttggctcactgcaaggtccgcctcctgggttcatgccattctcctgcctcagcctcctgagcagctaggactacaggcacgtgccactaggcccggctaattttttattttttttgtagagacagggtttcaccgtgttagccaggatggtctcgatatcctgacctcaggatctgccagcctcggcctccgaaagtgctggattacaggcctgagccaccgcacccggcccgactattttttttaatattagaaattgtgtatatagagataaaatctttgagctcataatctaagatttgatgacactacaaaagggcatctaatcaagtctactgctctcaggaaaaattaattccaaagtctattatgttgtatatttattaaaaccatgaaggtgagactctaggagaggtatgggcagggttaggggctctggaatgttcaaatacaagtccaaacgtttagagttgagatgaaaaacaggtattcagtattattctaaactcttgctgttattcataccaattgacatttaataactaatcaaggcaatattttcgttttcctagagatttatcctgcaataaaatacagtctattgaaagacatacatttgaaccactaccatttttgaagtttatgtaagttacaaatataacttgattacatttggaatttttataaaacttaattataaacctttttgctattcttgaaatatgattaaaattttaccagtagaaagctactaaaattatacagcaaatcctttttgtctctagcaaggattattgtgagaattattacacagatcttagtgaatcatcagagagcagtggttctcaggtggtgtgattttgcactcaggtggcatttggtaatgtccggagacagttttggttgacaaaactgtgagtgtgctcctggcatctggtgggcaaaggccagagatgctgctaaacatccttcaaggtataagacaaacccccatggcaaagagttatatagtccaaaatgttgatggcactgaagttgtgaaatcctgttctagagaaataaagatcacttaacacaggtatttactgagcattcactgttttgtatctaatgcaccacatgtgcagtgttaaagtataaatcataagccagtatcttccacagtcagatttccttagtgcatagagaaaggattgaggttatgttccatcctatataaattagaatcatggcaaatgataaatgttctgaaataattttttttttctttggcttgtgtcttttttttttagaaatcttagttgcaatgtaattacagaactcagctttggaacatttcaggcctggcacggaatgcagtttttacataagttgtaagtgaaatagaagatgaatacatgtaaacaactatttatgtacaaaaactcatacaattattgggtagctgggtataagcccattatcaactctgaaaagcatgtcttaagatccattcatttttctcaaatggggaagctaaggtacaaagaggccaagagacttacgtagcttatatatgacctcctctgcttgtcctagttctgacctatagcatgggcaagaaaaggcatcaaagaagtgaccctcaaattagccttgttgctgggcggggtggctcagacctgtaatcccagaactttgggagccgaggtgggtggatcacccgaggtcaggaattcaacaccagcctggccaacatagtgaaaccctgtccctactataaatacaaaaaaaaaatctgggcgtggtggtgcagttttttgctccctggaggactttgtgttaagcttccttccttgcagctaaatgttgcagacatttaagcagttagaaactctgcatatgagcaggaatcaaatccaaagttgtagggccagaatggtggctcatgcctgtaatcccagcaccttgggaggccaaggtgggaggatcactggaggtcaggagtttgagaccagcctggccaacatggcaaaacctcatctctactaaaaatacaaaaattagcaggtcatggtggcgggcacctgtgatcctagctatcgggaggctgaggcacgagaatggcttgaacccaggagggggaagttgcagtgagccgagattgtgccactaccctccaacctcccctccaggctggtctcgaactcctgtgacctcaggtgatccgcccacctcagcctcccaaagtgctggggttacaggtgtgagccaccatgcctggccaagatggtgtttatgttaagctattgtgcaaaaaaaaacttttgtaaagaaaatatatcgctgtatcttaattccatatactttcctgactactcttctaccataattgcaaaaattctatgatttctctgtataacatacccatcaaatcagagtgggtatattcagtggcctgaaggggactcaaggtgaagattctcctctacatctgactttagaaaagacgttccacctgccttgtggttcagaaatctagtttcacacagttcatttcaagttagagggaggcattcaggatgtgtctggactagagcagcagtttctgcacatgctcccctctgtcctcattaatttgctgatgcataacttaggaaaagtacactaaaggtctgtttttcttttgccctcacaccagagaacaggctcattaggtccctccaccaagaggtttaggtagcatcaatacaaatgttttaaactcaccatctttactaagcactttatacaactgggagtccctcataaaaatctggtggccgggagcggtggctcatgcctgtaattccagcactttgctgaggtgggtggatcacctgaggtcaggagttcaagaccagcctgaccaacatggtgaaacctgtctctactaaaaatacaaaaattagctgggcatggtggcaggcaactgtaatcctaggtactcaggaggctgaggcaggagaatcacttgaaaccaggaggcggaggttgcagtgagccgagatggcaccattgcactccagcctgagggacagagtgagactctgtctcaaataataataataatataataataataatcatcatcatcatcatcatcatcatcatcatctagccagcttcactacaattatgtaggcaacaccaggaaaacactggaatcacagttgataaaaattaatgaattcactcaaaaacattcagagtgtcatgtccatttgtgccaggtactgtactaagtgctggggctacaaaatccatctcaaagacacaccaagatgaggactttgtccccaggggactttcattcctcaaggaggaagcggatgctgatgggaaaacatatgagagccatgtggggatctgtacggcagggtgacaaggagaggacaaagcaggaatgggggctgggttaagaaagacttgagagacactaacttgcttatcttgagtttctgtgttcatcttaaacaacagaaaaaggcatttgcttcatggtgatgaaaaaatcagagctagctgatattggaaactagcactcatttcatataaacagaatagagctgtacccttcaaactaagtcacagttactttcaaagattggcacaagggtctcaacacaccaagtgtatgttaggggctgggcccttttggagtcaaatcttcctggtaaacaaagctacactgcagtcatatttggcatatgtgacatataggcccactgcatttccttccaaaggcaagatgccaagggaaggtgccagtaattttatgaccaatatgacaccattttgtggtgtttgtaagttgaaacaatatatttccctgcattacacaagtttataaaaaacaaacaaaaaaagaggccccagctgtggttgatcgatgatgaatagagcctaaccttccaggcttctcacttgcacaggcccttccaaggtcgtgggagggcccctggaaatttttgtattcataatttttttaatgtttttactagataaggctcaggccccacaaaatcctgaaatcatccctgggttccaatagttacaacccagtaaatctcttgaatgaagcctctatgttattgacaaatactgactggccaagttagcagggtgatagggtctgtctattttgaatctgaaatccatctcaaagacaggccaagagcttattagtggacttaactggattctgctggcccaagcgcagtaaagtcaaacaaccatatcgaggttttgcattggggaaaggaggacatttatttgcagggcatccaagcaagaaggaccaggcggctaactatcaaagtccctcactgaatgggggcaataatcatatctcttacagatgaaatcatgaatgaaatggtttatggaaaagcagcaatggttgataatcctaaatgttaagtatgtttatattttttccctgactttaaagtgcttctccttcattcctatacacaggtccagactgatggcttattttttaaaattctcttagtcacttcattggttctaacaataattttagaaactggatgactttgcaatgtagaaaggctatactttattcagatagagtacactcacatattggcttgtctatggcacatcgatatcatgccaagaatgtaagcactaagagagaataagaggaaaatccaggctttatccctattgaattatttatcccactattagaatactagtgaggtaggtgtggccacactgtgatggcaaattgagcttcggtcacaaacatgccttactgttccccccagtctactgacatcagcttcctttacatagcggtagatgcacaaaagtttgcacagttgagggtattgtcatcatgttttggtatgtactggaatcctggcagcttcttctctgattcggagaggcgcaaacattaaagacaaaaagaacaactcgagtctgtcctttggggtgatttagggtggctgtttaaatttgtagtggttgaaaagtcttgagattgtcacacctagcaactcttatacttttcttctctcagctgcagcttgttcttttcacctgtgtaacaagctgtcttctcttctcacagaagcttagcatttcttcctctgccccatagcattttttcaatacttaatttaccaggtgctgtttatgttgtaggcacctaagtacttatacaagtgagataacatgtccgaagttcttagaacagtgcttggcctatggtaaatgctccatacatgttacctcctatgatacctcattttcatttttccaacaactcttgcgatgcggttattattatcatttctattttgtagatgaggaagttgaaactcagagacgctaggtaatttgctaaggttcacacggctaataagtggcagaaccacttacaagctttgcaaataattttcaatgcagctcttagttcccctgtaataggagctgaatgatgacaatttggctttgtgtgcattgtatcttactttctaacttgaacaggacctgtagagcagtgagctccacttccctctgagaatcccacgcttctggagctcctggctgtaccagctctgggcatccccagggtttatgctcaccggtcagtgctggtgtgacatgatggctgagcaccggcactgtgtccagcgcattgctaggcactagacacgtgctctttcatttattcctcaaattgctttgtgctgtaaacgctacccagaaaggctcatgttcattactcaagtcacttcaccagaaagtgacagagccagaattcaaacccaggtctgccagattccaggtcccttgcttcttctgttgttgctcattgcaagggagtcttcttcaaggttattctcaggactttgattaagatacaggctcacagctgggcatggtgtctcatgctgtaatctcagcactttgggaggccaaggtgggtggatcacttgagctcagaagttcgagaccagcctggccaacatggtgaaaccctgtctctactaaaaatacaaaaattaaccaggcatggggacgggcatctatgatcccagctactctgaaggctgaggcaggagaatcacttgactccaggaggtggagtttgcagtgagccaagatcacaccactgcactgcactccagcctgggcaacagagtgagacttcatctcaaaaaaaaaaaaaaaaaggaaaaaggctcaccatttcagattctctagattttgcccctgaaaaagcatttacgtgatgcagtccgaggtcttgtatggaggagcttggtgtggggagatgtgtggctcacgaacctatgtaggtgaataaaggaaagaggttactttctccccaagtacatcgcgcatattgggtgagggtctaggtcatctgcttatttctttgactaccttcttccatggaaccagttttccctgacagccttgggattctagcatagatcattttggagtttgtcatttaaatttattttcacagcctgctttggacattttttcagctagagctgttaggatttcagtacatttaagacagtgatgacatgctccagtcctttcatctctctctcctcagttaatagaaaggaaacatagctcatctatctggacctgtacagaagaatttggagggaaaaaaaagaacaagcaagaaatgttcccttattttgtgagctacctttattctgtcccattgttctacagcaaaaggcttgtataaaaatatttcagttttcctcatctaataaggcatatttaataaaattatttagagcagtacttcttaaacttttactctgagacagtctttgaggctgaaaaaaagcttgccacattttacttccataaagataccaaaaaggcgatggactgggagtcagtgcaccttagtttaatgtataaaatgaaggacttgaaccagaaatggaaatggtcatctactgtgaatctaaaaacactcaaggctgggcgcgctggctcatgcctgtaatcccagcactttaagaggccaagacaggcagatcgcttgagcccctggagttcaagttcagcctgggcaacaaagtgagaccccaatctctacaaaaagacttttaaaaagtggaaacataaatataaataaataaaaacactcatatcatttggtttgtggaaaagagttgctgtagagtcctcaaacttgagccgttgagccagttcccactcagtctctccatggcccaggcacaaccttagtcaagaaaagaatgccttagaacaggaggaaaagaggataatatcgaatggccctatattttgatttcattagggacaaatgcaaagatcctaatgtcagctggagaagagcttcctagttcagaggtaatgctgagctcaaggctatggatgagctatcaagaaagagggaaggttggagagtgagagaattttggaggaaagataacaaactttgccaagttgtttggctacatactgccttacagtcattatttttggtgtttagaaaaaaatagaaacagggtctcactttgttacccaggctggtctcaaactcctgggctcaagctttccttctgctttggcctcccaaagtgctgagattacaggcttgagatgctgtgcccagcctacattcatttttaatagctgggaggaaagtgggcagaggaagatatagaatgaaggggtagccgactttgtacagagcccaccagtggtcttacaagttttcatgccaaaaaaaatcacgaaggatatttaaagccctagtttgagaatccatacttaaccagtcatgtggcactcacattctttctctttgtaacatcatcttattgaatattagtgttacaaaacaagttaatggcactgaaaaaccatctggaataggaaagaggagggggatcacaaggcaggacaagctgtgtggctcccagcctcgccactgactcactctgatcttggtcaagggagaatgaatcttcactcctcttttttccatctgccagcatgtttggtcttctggcacctggtgttctatacagtacaacatgcttctttgtgttacattgagacttgatccacgtaccatcaacgcagtattataaagtgtacaattcagtggtggttagtatattctcaaggttgtatagcaaacaatcaccattatctaaccccagaacattttcatcatcccaaaaagaaacatggtacccattagccatcactccccagtgctgtcttcccgcaggcccaggtaactactaatctactttgagtccctatggatttgcctattctagatctttcatataaacgaatcatacagtatgtggccttttgtgtctagtttcttttcacgaagcatgttgtttctaaggtcctcccatgctgcagcatggatcattcctttgcaaggctgagtgatattccattgtatggagccatcactatatccgttcatccattcatcacttagtggacatgtggttgtttctactttattttggcttttatgaataatgctgctatggacatgcatgtactactttttgcgtggacatgtttttaattctagggtgcatccctagcagaattgctagatcgtatggcaactcttatgtttaactttttgaggacctgtcaggctgatttccacagtggctgctccattttacacttccatctgcaatgtttgagggtttcaatttctccgggtctttgtcaacactgtcgttgtctgtctcttctcatagccatcccagtgagtgtaaagtagtatctcgctgcagtttttgatggacatttccctaatgatttaagacattcaacatttttatgtgtatatgagccatttatatatcttctttgaagaaatatttattcacatcctctgcccatttaaaaaattgatttgtctttttattgaattataggaatttctctatatcttctggatactctggatattagaccttaacagataatttgccaatattttctctcatcctgtgagttctgtgactttcttgccagtgtcctttgatgcacaaaagtttttaattttgataaaatctaatgtatctatttttcctttggttgtttgtgcttttggtgtcatgtgtgtgtataaaatgtcttattcttctttaaaaaggttcagtgtttggttttaaatcaggctgtgtccctttcatctgtctgacattcttgtcaccatgtcaggctgccttcagctagtaatacttcattaaattcaaaagacaaaattgttttaaaagaaaaaaaatccagtttggagaagaaaaaactgttgtctaatttaaggtcatgaaatttactcccatgtttttgtgtaagagtcttatcgttttggctcttacatttaggtatttgacatattttgcatcaattcttataatcgtgtgagatgtagggggtccaccttcattattttgcacatagatgttcaggtgacgccattacactcaagcctgggcaacagagtgagactccaatggagacggggtttcagcacgtttatcaggctgctctcgaactcctaacctcagatgatccacctgcttcagcctcccaaaatgctgggattacaggcatgagctaccatgcccagccaataaatgaaaactttttcactcaaaaaaacaacaattgtagtgaaaccatagatcagtttggagaatcatgctattattatctgcttcatgtttacagaatactccgttgaatttggtttgccagattttgtcaagcatttttccatctacattcataagaaatactggtctgtaattttttgtgtgtgatgtctttagtttggataccaggttaatatcaccctcatagaataagttaggaaatgttctttcctcatctgtattttgaaagactttatgaaggattggtgttaattcttctttaagtatttggtagattcaccagtgaggctgcctgctggtcttcagcttttcttagtggaaagttttttgattactacctcaatctctttacttgacataggtctgtctattcagattttctgtttttttctcaagtcagattcagtagttcatatctttctggtaatgtgtctttcatccagcttatccaattattagcatatattgtttatatgtataatcctttttattcatattataatcctttttatgtctctaagaacaatagtaatgtcccctctcatttctagttttaataatttggtcttctgtatttttgcagtgcagtggctcacacctgtcatcctagcactttgggaggctgcggtgggaggattgcttgaccccaggagttcgaggccagccagggcaacatactgagagcttatctctacaaaaaaaatgtaaaagttagctgaacgtggtggcacatgcctgtagtcacagctactcaggtggctaaggcaggaggatcacttgagcccgggagatcggtgctgcagtgagccatgattgttccactgcactccagcctgggaaacagagtgaaaacctgtcttgaaaaatgaacagtaagaaaacaaaatgtttgtggccagatgcagtggtgcatacctataatccctgtactttgggaggccaaggaaggaggattgcttgaggccaggagtttgagaccagcctgggcaacatagtgagaccctatctctaaaaattttttttagttagccgagtgtggtggtgcgcacctgtagtctcagctacatcttaattttataacgttgtagttcagattaattccaactttgtttcaatggtatacaaaaactttgcttctctaaagctccactctcaccccctcctttatactgttattgtcacacattacatctttatataccttatgttcatcaactagatttataattattgcattatgtaagtatctttttcttttttttttttttctttattttgggacagagtctcactctgttgcccaggctagagtgcagtggcacaatctttactcgccgcaacctctgcctcccaggttcaagcgattctagtgcctcagcctcctgagtagctgggactgcaggcacgtaacaccacacccagctaatttttgtatttttagtagagacagggtttcaccatgtttgccaggctggtctcaacctcttgacctcaagtgatcctccagcctcagcctcccaaagtgctgggattacaggcctgagccactgcgcccagccagtgctttttatttctttgtgcagattcacgttagtactccttatagggcaggtcttctagcaacaaagtctctcagtttttatttatctagaatatcttaatttctcttcaatttcaaaggtagttttgccaggtatagaattattggttgacagtttcttcagcactttgaatatgccatttcattgccttttgtcctccagtgttgtgtgtggttgctttgtttttagacagggtcttgctctgttacccaggctggagtgcagtggtgcaaccactcacaacgttgcagcctccacctcccaggcttaagcaatgctgtcacctcagcctcctgggtagctgagactacaggcatgcaccaccatgcccagttttttttgtttttgtttttgttttttttaatttttttttattgatcattcttgggtgtttctcgcagagggggatttggcagggtcataggacaatagtggagggaaggtcagcagataaacaagtgaacaaaggtctctggttttcctaggcagaggaccctgcggccttccacagtgtttgtgtccctgggtacttgagattagggagtggtgatgactcttaacgagcatgctgctttcaagcatctgtttaacaaagcacatcttgcaccgcccttaatccattcaaccctgagtggacacagcacatgtttcagagagcactgggttgggggtaaggtcatagatcaacagcatcccaaggcagaagaatttttcttagtacagaacaaaatggagtcttctatgtctacttctttctacacagacacagcaacaatctgatttctgtatcttttccccacatttcccccttttctattcaacaaaaccaccatcgtcatcatggcccgttctcaatgagctgttgggtacacctcccagacggggtggcggccgggcagaggggctcctcacttcccagaaggggcagccgggcagaggcgcccccccacctcccggagggggcggctggccaggcgggggctggcccccacctccctcccagacagggcggctgccgggcagaggggctcctcacttctcagacggggcggctgctgggcggaggggctcctcacttctcagatggggcggctgccaggcgtaggggctcctcacttctcagacggggcggccaggcagagatgctcctcacctcccagacagggtcgcggccgggcagaggcgctcctcacatcccagacgggcatgcccagttattttcaaattttttgtagagacagggttttactctattgccagtgctggtatccaactcctggcttcaagcaattcttgagcctcaagcctcccaaggtactgggagtacaggtgtgagcaaccatgtccagcacctgcattgtttttgaagagaaattagctattaatcttattgaggatcccttgtatgtgatgagttgcttttctcttgctgctttcaagatattctgtctttggcttctgtcagtttgattacagtatgtttagatgtggatccctcagtttttcctacttgtagttccttgagcttcttgaatatgcagattgtttttcatcatgtttgggaagtttggggccatcatttcttcaaatattctttctccttttttctgtttttcttctcctgggacgctcattatgtgtatgttagtaagcttgatgatgtgttccacaaacaggtctctgagattccattcactttcattcatttttatttctgttcctcagagtcaacaatctcaattaaccttcaagttccccattctgtcttcagcctgctgtaatgtgccattgagaacctctaataatttttccatttcagttaccatacttttcaactctagaatttctatttgactcctttttatggtttctatctctttattgatattctctatttgatgagacattgctttcatactttcctttagttctctagtctacagaactgaatcgtttctcttatctctttgaacatattttaaatagctgaattaaatccttctctaggccaggcatggtcgctcgtgcctataatcccagcactttgggaggctgagactgaggttgaggctgaggccaggagttcaagaccaccctgggtaacttcgcaagaccccacctataaaaaataaaaaaatctttgtctagtaagtctaacatctggtccttctcagggacaatttctgcttatttctcccccaaccacgtgtttgggccatactttgtttccttgcatctttcataaatgtttgttaaaaattgaatattttaaataatataatgtagcaattctgaaaatcagatccatgctgccagggtttggtgttactcctgcttgtgttagtagttgctatttatttagtgacttttctgaacttcttctgtaaagtctcgcattatatgtcatgtgttcccactaaagtccctcctcggttagcttaccgatcaggtaatgattaaatgaagatttacttaaattcttggaactgataagtctcctagtttttgccaaggggctctgtgtacatgttggggcataccttcagcactcagctagacaatttacagccatgccttagctttcacttcttgcttgtgcagaacctcaaggtgtcagccaggggtgagagtttatgaacttagtaggtctttcctgaccatgctgacagtctgccctatgcatgcgcgtgacattccaaattgccaggaatatgtcttatggacttctagtttcccaagcatatatcagagtgtttcaaattcctgtggacatcttattcctcagcttttcctattaagctttttgattaggcttttttcccccaaactgttattcattgccgaatacagttgccatgttaaaacacttgtctgtaattgttttccaaaaacaccctctgtggagaggctttagcactagacagctttcattctggtcaaataaagacaaacctttcaaatgaggtcttccagggaaccaccagacagatgacatcatgacagttaactgagaataaggctttgaaggagctccagctccattctgctccctctggttggggatgtgggctgttttccaaggcgactactgagctagagggtgaggaatggtctaaggcaagttaacacaaatctcactgttcttacagaaattttttttgaataaatgctccttgggttgctgcaagactttggttacatttctagagttctgaaaaagtttattgtggtcaatttttttttttttttttttttttttttttgctattttttttggtatttgttgcttttatgaagggatgaatttttggatgtctctttttttttttttttttttttttttgagacagagtctcactctgttgtccaggctggagtgtagtggcataatctcatctcactgcaagctccacctcccgggttcacacaattctcctgcctcagcctcccgagtagctgggactacaggcgcctgccaccacgcccagctaatttttgtatatttagtacagacggggtttcactttgttagccaggatggtctcgatcccctgacctcgtgatccgcctgcctcagcctcccaaagtgctgggattacaggtgtgagccactgcgcccagcctgcatgtctttattccaccattttcactgatgtcacttacgacatgattttaaatctctgaaggctcactgggcacatgcctgtagtcccagatactcgggaggcaaaggaagaaggatcctttgagtccaggaattctgggctgtagcatgctatgctgattgggtgtccgcactaagttcagcatcagtatggtgacctcccgggaaaaggagaccaccaggttgcctaaaaaggggtgtaccagcccagttcaggaatagagcaggtcaaaactcccatgctgatcactagtgggatcatggctgtgaatagccactgctctccagcctgggcaacacagtgagtgagaatgtgtctcttaaaaaaaaaaaaaaaagtctcattgaccatagactaataaactatttaatcatgggaaatgattaggggaaagacataaaaagagaaactgtaatccacttttttttgctctgtcgcccaggctggagtagagtggcttgatcttggctcactgcaacctccgcctcctgggttcaagcaattctcctgcctcagcctctgaaacagctggaattacaggcaagcactgccgtgccctgctaatgagaaattgtaattctcatagaggtcctcccagaggagtagaagaaggttgaaaggcacttctgtatttagtcttctcacaattaaggctgggcccagtggctcacaccagcactttgggaggccaaggcaggcggatcacttgagatcaggagttcaagaccagcctggcaaacatggtgaaactcccatctctactaaaaacacaaaaaatagccaggcgtggtggtgcgtgcctatagtcccagctatttgggagactgaggaaggaggattacctgagcttgggaagaggacgttgcagtgagccaagatcacgccactgcactccagcctggtcaatggagcaagaccctgtttgggtggggaggggaggggagtggaggggagaggagaaaggaaagaaaggaaaggaaagaaaatagaaagaaggaagggggagggaaggaaggaaggaaaaagagagagaaaaagaatgaagaacaaaaatgaaaattttttaaaaacctaaggttaaaataaaccctttttcttcatacagattaaacacgagttcaaattacagctttgctgcttaatagcttggtgacctaggacaagttatctaacctctctgtgcctcagtttcctcatttaaaaatagggcaataataatatctaccacataaggtatttgctgatcacaaatacctggcaacccagtagatactcactgtaataattattatttttataatttctgcctaagtacaaagatgattcttgggttaacctaaaggtagattttcttttatttcttcctgtttcttttatttttcttgttcaccttaaagaattaaaaagaaaatcgattccagcattttggaataaaaatttgcatcaaaatcaatttattcattttattgacatatgaacaaaatgtcatttgtttattcaataaacatttgttaaatgcctaatacatttcagacatcatgccaggcacggggatgacagggcatggtggcaggcacctgtaatcccagctacttgggaggctaaggcaggagaattgcttgaacctgggaggcggagattgcagtgagccaagattgcaccactgcactccagcctgggtgacagagtgagactccatctcagaaaaaaaaaaaaaaaaaaaaaatgtggtctctgccctcaaagcgctcatagtccaggagcctgacaagtggacaggtgattacatgcaatgtaagaaaggctgtgatgtcatacaagaagacaagtgggagtatggttttgaccagttcctcctcttagatttattccttcttctttggctataaagcaaaagaattggtcctatttttttttaactgtgcaaattaaaccataaattttaaaaactttataaagataaaagacaagcagccagccgcagtggctcatgccagtaatcctatcagtttgggaggctgaggcaggtagatcacctgaggtcaagagttcaaaaccagcctgaccaacatggtaaaaccccgactctactaaaaatacaaaaattagctgggcgtggtggtgggtgcctgtaatcccagctactcggaaggctgaggcagaacaggagaatcacttgaacctgggaggcggaggttgcagtgagccaagatcgagccattgcactccagcctgggcaacaagagcgagactccatctcaaaaaaaaaaaaaaaaaaaaaatagatgaacaacttgaattatgatgagcaacttgaattatggaggatgctagaaatactgtttcctccacagtcagggcttcctaccaacatagtcacttttagggtttttgacctgaaaagttctgtggcatattttttctttgctatccactttttttttccttgtagttcttccccgcgttctatcctttatcttctagagaccttggtagttcccataggaatagtgctttacggagtctaatggtgatttcttaggtaaagacaggaaacatttttttcttttttacctacaagttccatatcaaaaaatgaatgtaaacttttcatgcagttttacacattgaaaatgcaggttattttaattccattccatttttcagaattctcaatcacaatcctctgacaactgttgaagatccgtatctctttaaattgccagcattaaaatatctgtaagtactatagtactctcatgagtcaagagatgatttatgctttttaaatttttcatcaaagcttaagtattttgcatttaggctaaaatgtcataatttaaattttaactgggttattgaaaaaaagttattggcgaagaaaaaaactaagaggatgtataatggtcaagacagccagcaggggaagagaacagcattgaagaacccatatagatttggaacatgtagacacatggaggaatattatttaaccaagaaagcaaaggggaaaaggtgttcattattctaaaaataaagaaaagagtaaataagatggtgagtgcaatatgaaaatgagaagataatggtaaaaaaaaaaagtgtcagttctgctcttgagtatcattaatttgatgatgcaaatcaacttttaatttctttaataagagctccctggaattctacagcaaataaagtcttgagctggcttgtttaatagagaagccaaaattgaattgttaagtacagaattttttattggggctcatatcatgaatgtttcggctttcttcttcagagacatgggaacaacgctagtcccacttacaacacttaagaacattctcatgatgactgttgaactggaaaaactgtaagttatttttttctgagatttatttttacttagttggttctttaggtttgttttattattttcttaagtcaggttcattgaggtataattttcatatagtaacattcacgctttttaagtgtacagtttgatgagtctgacaaatgtatagttacataaccaccaccacattcccaatataaagcatttctgatgcctcaaaaaggcccctactgtccctttgtaggcaatcccatcctcccaccatcagcccctgttagctactaatctgatttctgttcctatacttttgccttttccagaatgtcttataaatgaaatcatatagcacatagcctcttgtgtttggctcctttcacaaagcctaatttttttttttgtttttgaaatggaatctcactctgtcgcccaggctgcagtgcagcggcatgacctaggctcactgcaacctccacctcccaggttcaagtggttctcctgcctcagccttccgagtagctgggattacaggcgcatgccaccacacctggctaatttttgtatttttagtagagacaaggtttcgccatgttggccagggtggtttcgaactcctgacctcaagtgatccgcctgcctcagcctcccaaagtgctaggattacagataagatccaccttgcctggcctcactcagcagaattttttttgagattatgctaccatccatgttgttgcacctatcactacagctggccctccatatctgcaggttcctcatccatagattcaacgaaccatggatggggaatatttggaaaaaataaaatatataaaacaacaatacaacaataaaagcagtagaaaatttaaaatacagtataattatgtacataccatttacactgtattaggtacttagagtatacctgaggctgtatacaaacattatgtcatttcataaaaaagaactcagcatctgtggactttggtatctgcagggggtcctggagccaatcccctgcagacaccgagggacaactgttcactcctttttattgctgagtagtattccggttgtgtggaaatgccatctctactaaaaatgcacaaactaggcaggtgtggtggcacatgcctgtaatcccagctactcaggaggctgaggcacgagaagtgcttgaacttgagaggtggaggttgcaatgagccgagattgcaccactgcactctaacctgggcgacagagtgggactctgtctaaaaaaaaaagtaagaaataaaaatgttttctgaagagcagaagtttttaattttgaccagctttaagttagcatttttttcttaaatggcttgtgattttttgtttcttacctaagaaatctttaagaacctgttgtctaatccagcgtctaaaagattttctcctatgtcttctcccagaaatgatacacatttaggtctatgatccattttgagttaatttgcatatgtgatgtatcttttttattttttatttttttgtagaaatgaggtctcagtatgttccccaggctggtctcggactcctggtctcaagtgatcctcctgcctcacctcccagagtgctgagattacaggcatgagacaccgtgcctggccttctttgcaggatatatatatagatatagatatatatataaatcagccaggtgtggtggcacacgcctgtagtcccagctactagggaacctgagtcaggaggatcacttgaacccaggaggtggaggttgcagtgagccaagatggcaccactgcactccagcttgggtgacagagcaagaccctgtctaaaatatatatatatttatatatatgtacgtgtatatatgtatatgtatgcctgcggggccctattgtgagtttgttacacaatttactgcaacttcaattgtgccaccagcccccacaatatggcaagctaaatagagactcagttatgctagggctggttgagggcattttgcaagattagcatggaaagggcccttcatttagcactctgctccgttcatttttgtcaggtcactttcttatcttgaccaggttgtcagatctcttttactgctctagcctcactttcctcagcctcctgcagcatcttccccatcagctggatcccttcctctctggatgaagtccccttcatcgaccagctttctcacttagttctctaagatagtgaggatctgtctgcttttttcttgaccattattggataggaaaaatgctctcatcctctgtaatgatttgtcaccaaggccataaagacattgaactaaatgtcttatgggagttcattattggaagtcttcaggagtttacacatttatgtacaaagtaagtaggccagctcatttgagtcttggctcatgtgtaatgatctttcatgtgtattgaaaaattattctcaagtatacctcaggtcatttacagtctcaaagatttgtcagtatactttaaaacaatcctgggaacagttctagattgaaggagactaaagaatcatgtactaagtgtaatgtctgatgtttgattggattgtgaattttttaagccatgttatgattgggacaattgtgaaaatgtgtatacggaccgcatagtagacaatgataatatgaagttccattgagtgatgatagtcctctggttatgtcagagaatgccttggttcttaggggctgcacactgaagtcttcaatggtgaagggtcattatgtctgcaactgactctcaaatggttttgtccagaaaatgtatagacatacacacacggaaagctaatgtggcaaagtattagcaactactgattccagatgaaagttatacaggtgttcattataccatttgaaaatgtttcccagccatcctaaggcttaaaggaaaaaaagaaaatgtttaaaataaaaacttgggggcagaaaaagaataccaaaaattttgggctcatgcctgtaatcccagcactttgggaggccaaagagagagggttgcttgtgcccaggagttcgagaccagcctggacaacatggtgaaaccccatttctacaaaatatacaaaaattagccaggtgtggtggcacacacctgtagttctaggtactcaggaggctgaggtgggaggatcacttgagcacaggagacagaggctgcagtgagccaagattgcaccactgcactcagcctgtgtaacagagcgagacccggcctcaaaataaacaaaagaaacacctttgtggcagaggtaaggttgctatacaacaaaatgctgggttacggttccgggtccattccatatgaagatcagaggcttccactggacccaaaggaatactactagtcacttgtgattgttcctttataggtttgaaagatgtctcaggccaacttattggatgcagttttaatctaaaactctatacattgtacccccaactcacagacttcttgtatccatgaaaccctcttctgttttcatagtcttaatatggccccaataaagccatccttttggaggactcagaaaaggccccccacaacctctgcaacacaataattatagttaactcttattgagcactcactgtgcaccaggcatttttcaggtattgattcatttgatcctcaaaattcattagaggtaggtactattataatgacaaggccaaggaacagagattaaacaatttgcccaaattcacattattagcagagctgagattgaagcatagtctggctatggaatctgtattcttaatgaccatgctatactgcctaagattaaccttttacttcagttacagggattgtttttatctctctgaaagtgcccccaataagccacaacaataaattaatcaattgtctcggtcacctcttttgcccaaatttacgtattggaaaaaattcaaacaagccagaaagatgaaagaatagtacagaatccaatcaaagatcaggcactgcatgtcatgtcttcatttcctttaatctaaaacatgcctctactttctttgatctttcatgacactggcattttttaagagtcaaagatagttgtcttgtaaattgtcccacaatccagatttgtctgtttcctcatgatgaaattcaagttaagcatttttgggaaaaatactgcataggtgatgtatccttcctgcctcgtaaccgcagatggcctgtaatactaagtttgatcacttgactaaggtgatcttccaggtctctccattgtaattattttgctggctacagtggctcccacttgtaatcccagcactttggaaggccgaggtgggaggattgcttgagcccaggagttctacaccagcctgagcaacatggggaaactctgtcactactgaaaatacaaaagtacaaaaaaaaaaaaaaaattagctgggcatggtggtgcaagcctatactcccagctactcaggaggctgaatttggaggatcccttgagcccaggggggttgaggctgcattgaggtataattttgccactgtatttcagcctgggtgacaaaataaaaataaaaataaaaaataataattttccccttggtaattaataaataatctgtgggttgttactttgagttcagtgaagatcctgttctcaaatgttttttcacccaaatgtgcatcaatgataatccttgtctgaatgaatttgtattacactgacggttgcaaagtgacacttttaaaaattctgtcattccttctacatttactagctggcattatttcattgaagaagaactcctcctctttctttttcaatatcactcttcgtggattcttctttatattaaatatgtggtaacttattgttgttattcttttgaatgctcaaattgtccagatttgaccaatgcagtctttgttattttttaactccgcaatccaggttaaactaagctatttttaatgcccagagtaatttataatatttcccactcccaacaggaattgagaaagggactccagaagttgggggcttattcagacttcttaaaagtctaccttcttcctctgtactttcagcccaaagtgagacttttgaattgggaagagatacttctgaaactactaatcactgtcacccaattctaatcccaaccatctttattctaggcataccatactcactgccatgcttacccttcagttgggcacttttgtcctccttcctattggccttctggttcctacccaactgtccagtccataggcttcaatgacacctttttcccacacctgtggtagcgttggctgcctcctttacctactcaagtaaccgctttaccgctaatttattgctctctgttttcatctataggatcttacctagccatatggcctgctgcctctgccaatttaaaaacagcattgaggctgtctgcaagacagtcaagctgcattgcaacagtgcatgtctgacaaacaccacacattgtcgtgagtccaaattgcgcggtgataaattgttacattaagtatttgtttttaaactttttatttttaatgatgataaaattttaagctaatgacataattgctttatttttatttactcattcagagttaaactccctcaatttccgaactactcccttgctgaaagtcaggttctcagttactattacaaaatttaataatagaactgttccatatgcagaaaggaccaagacaaaggaatgggaaggctagggaataacattaacatccacacactgtatactgtgctctctgcttgatgctttgcccacagtgataatttcttcatatagtgcaatgtagtttgtaagctggttttaaatccatgagatctcaagtactctctgccttataggacagatgtagatacggttttggtctttctgtttttacagttttataagagtacaagtgatgctgttttatttgaagcctgagagcttctggttccataaccagaaattgctacctggctcttctaatggaatggagggcttttccattcttagaccatccaactctgaacttgctccgaatctcaaacctttctgttcacagaacaaacgctcaagggctttcaagagtgtttctgtagattaggcttattagcatcaacttcatgacttctaaaatgtgactgctttcatgtccagatagcttgaatacaggtatctaccagtgatatggggtggagaattaataatgcttggttacataaagtcagtgttgcttatttttcaaaactttttttttttttttttttttttaccaattatgttattcccttctccccaagaagtgggcagaaaagctttgttaacctccttttacagatgaggaaaaacaagatcagaggtgctaagtgctgtagcctagtgccaggtcttctggccccaattctgggttctccccaagcccatgtttcttcccctttctcacaatctttacttcttcctctgaccctcaccaccacccaaagtacttttaattccagaaaagaaacccagctgcacactggcacacctgaccttcatgcagtcagaagctttggatgattccccatccaaaatattagagatgaaatgaaagcaaagtaggcatctgacaaaagttgctttttcccttctgcattttaggacctcaagtaatgtttatccagaaactgctatcataccagggattcattgtgtatttaacaacataggcatacaatctggcaaatttgaaaaactcttaacatacaccccaaatccctgcccaaatttaagaactagggtggacacagtgcgtttttccatgtcgcatcttctgtgatggggctacgatacgtgggagcagagaatggggagggtggagcgcatgccagatgaggatctatcagcaatgggacggggcctccactttagcatctccaccctgctcctctcagaggaccgcctttcattgcattcagctgtgatggtagcacgaacacaggtgcaccgaggacgaggagagcaggagccttgtgctctctctgcatctgaggcaggacagcacagggtacggagcagtctgcagagaggccagctcatcagggaagcacttgtcttccaccttgggctttgactgagcactgggcaattggcctctggggatcaacgaaataatcctaaacagagttactctatgtcacactatggaatgttccaagtaggtggccgtgttttcaaaagatgtattttctccttttgttgttgccatttcataggtttaggattgggtgtgtgtttctcctctctgaatggcactcgaatgtttgctgactcctactctgtgtgactggggtgtacagctatggactgatgcatcccatcccatcatctttcatgatcaaagcagtctcttcttttttgacagctgaagaagcatcggtagggaatccagaaggagcgttcatgaaggtgttacaagcccggaagaactacacaagcactgagctgattgttgagccagaggagccctcagacagcagtggcatcaacttgtcaggctttgggagtgagcagctagacaccaatgacgagagtgattttatcagtacactaagttacatcttgccttatttctcagcggtaaacctagatgtgaaatcactgttactaccgttcattaaactgccaaccacaggaaacagcctggcaaagattcaaactgtaggccaaaaccggcagagagtgaagagagtcctcatgggcccaaggagcatccagaaaaggcacttcaaagaggtaggaaggcagagcatcaggagggaacagggtgcccaggcatctgtggagaacgctgccgaagaaaaaaggctcgggagtccagccccaagggaggtggaacagccccacacacagcaggggcctgagaagttagcgggaaacgccgtctacaccaagccttccttcacccaagagcataaggcagcagtctctgtgctgaaacccttctccaagggcgcgccttctacctccagccctgcaaaagccctaccacaggtgagagacagatggaaagacttaacccacgctatttccattttagaaagtgcaaaggctagagttacaaatacgaagacgtctaaaccaatcgtacatgccagaaaaaaataccgctttcacaaaactcgctcccacgtgacccacagaacacccaaagtcaaaaagagtccaaaggtcagaaagaaaagttatctgagtagactgatgctcgcaaacaggcttccattctctgcagcgaagagcctcataaattccccttcacaaggggctttttcatccttaggagacctgagtcctcaagaaaacccttttctggaagtatctgctccttcagaacattttatagaaaacaataatacaaaacacacaactgcaagaaatgcctttgaagaaaatgattttatggaaaacactaacatgccagaaggaaccatctctgaaaacacaaactacaatcatcctcatgaggcagattccgctgggactgcattcaacttagggccaactgttaaacaaactgagacaaaatgggaatacaacaacgtgggcactgacctgtcccccgagcccaaaagcttcaattacccattgctctcgtccccaggtgatcagtttgaaattcagctaacccagcagctacagtcccttatccccaacaacaatgtgagaaggctcattgctcatgttatccggaccttgaagatggactgctctggggcccatgtgcaagtgacctgtgccaagctcatctccaggacaggccacctgatgaagcttctcagtgggcagcaggaagtaaaggcatccaagatagaatgggatacggaccaatggaagattgagaactacattaatgagagcacagaagcccagagtgaacagaaagagaagtcgcttgaggtgaggaccacacagaaacatgagacccagatttcccatcatttagcatatcccaggaaagtgcccacacagaagagtctgggactcccaggccatagcttatcttggccatgtaactttggtcatgacagtgatctcccactttgctcatgtagagagagaaatagattagggcacaagatgaactgtaggccgggggtggtagctcacgcctgtaatctcagcactttgggaggcgaaggtgggtggattacttgaagtcaggagtttgagaccagcttggccaacatagtgaaagcctgtctccacaaaaaataagaaaattagctgggttgatgacacgtgcctgtagtcccagctacttggaaggctgaggtgggaggatcacctgagcccagggaggtcgagtctagtgaacggtgattgcaccacggtacccaagcctgggtgacagagtgagaccctctttcaaaaaaataaaaaagaacctgtcagctactcacctggaatactggggttttgaatagttagctctcattctggttttttttttgtgtgtttttttttttagctcaaaaaagaagttccaggatatggctatactgacaaactcatcttggcattaattgttactggaatactaacgattttgattatacttttctgcctcattgtggtaaggacaataattaattcaggttttcagaatgcagtcctgtctttgtgtggattcagagctcacaaactgaaaaccaaagccactttcccacctgctgctacttgacatacttcttcagtcatttaaggctgaggtgtatgctttgttcttttactgcagtgtatatttcaggatttttaaaggatcctcgctttcagatctctgtgaattgaaaccatgtgaatcccactagactattttaagaagtcgaaaatttctcccacccaaaactatgtcaacaattggatgtactcatcaagtcacccttactctgccactaatttatttccttgttgctgaaatgatgagagaggtataatctccaccctcacggagttgtcatcaccctggagaggaaggagagagccaaaagacatacgtattgtcttgtagacttattagatttacacagtatcgtcctccagtgtgtaaggcattgtctaaataggtccagttaaagcactacagagtagccatcttttacaaaaatttttggccacatttttaagttcactggtgagggggaacgtctcatactctagccctcctgagcctagaccctctgtgagatgtgtcaccatttcttggacaccatgtgagacattccccctcagattagagatgctcagcttgcatcaacttacctaaagcctacatctggctactctgggacaagtcctgtttacagtgcccattcctggagcttgcctctgtcttttgttcgattacatgatgtattacttttcccaacaggccagtgctagcatattggaagagtgatttaataaagctggcaaccttgacgctatgccaccagtccaaccttacttgcctcatttaccatttccattattgtggcagccctccattccagccacagcagcccctcaccaaaccccagtcacaccacccacatttctgcttttgtctgtgtgtttgtccatctaaaatgcccttatttcactctgcctgtgggagtcctatgcatctctcaaaagccaactcaagttcatctttcttcttgacaccttccctgaatattccagccctgctgagcctagtccctttgtgagatttgtcaccatttcttggacaccatatgagagacttcagaggctgaagtgggaggatcgcttgagcctgggaggtcgaggatgcagtgagctgtggtcgtaccactgcactctagcctgggcaacacagctaggccctgtcttaaaaacagccaccaccaaaaactatcttgggatttgaataggattacgttaaatttgtagattaatttgagaatttacatctgtacgacattctaggaacgtgctatctcatgtcatgtattcatttcttgttaatgtctttcagaagagctttagtgtttccatatatagatcttatacatcttttgttagataaaagatctttgtatttttgttcctaaattcttcatacatttgtattgccattgtaaatgggatctttcttccattttctaattagttattggtggtacatgggaaaagtatttgaggtttgtgtgctgatttcttgattttgtagatagccactgtattgaattctcattacttccagtaaaatcttagttgattctcttaggcttctttggctaacatttatcatttaatatgcaaataatgatagttttgtctcttcctttccaatacttctactctttccttcctttcccttttcctttttcctttcctttcctttccttttttttcccttctcagggccttgttgtcacccaggctggagagcaatggtgtgacctagctcactgtaacatcaaactcctgggcttaagggatcctcctgcctcagcttcctgagtggctgggactacaggcaggcagctaatttaaaaaatgtgttcgtagagacaaggtcttgctatgttgcccaggctggttttcctgccacttcagaggaaggactcaggtttcctttttctcctacttttaagagtttttattaggaattatctgttgaatgttatctaaaacagtcaataaaatgtattaagtgccagctgcatgcaagaccctaagttagatacagtcagccctcttcatcagcaggtccacatcttcagattcaactagatcaggctgaatatttgaagaaaaaaaaaaccaataaaaatacaaacagaaagtacaatataacaactgtcaacaatgtacaatatgtatacattttattagtgatgacttaaattacatggggccaggcatggtggctcacacttgtaatcccaacacattgggaggccaacctgggcagcatagtgagaccttgtctttattaaaaattaaaaaaaaaaatagccaggtgtggtagtatgcacctgtagtctcagctactcaagaggctgaggtgggcggatcactggagcccaggaggttgaggctacagtgagctgtgatcgtgacaccgcactccatcctgagtaacagaggatgacactgcactccagcgtaagcaacagagggcaatcctgtcgctaagtaaataaagtataggggggatgcgtgttggttataagcaaatattacaccattatatgtaagggattgagcatccacagattctggtatggtgtgggggcggtatcctagaaccaatcccccgcaagatagcaaggatgactgaactatggaagaatcaaagcagtgttacacagcatacaattcctgtcttcaaaaaagttacctcatcaggtagatgagacttataatgaataaaaggaatcaatacagatttggagacggtggttgttgtcatagataatcttaattgcgttttcttctaaaacagatatgttgtcaccgaaggtcattacaagaagatgaagaaggattctcaaggtaaatattagtctggtgattttttttttcttctcttttgagacggagtttccctcttgttgccaggctggagtgcaatgacacgatctcggctcacggcaacctccacttcccaggttcaagcgattctcctgcctcagcctcccgagtagctgggattacaggcatgcaccactagtctcgcgacgttttaattagaattttagaattagaggagggcttagaactctgccctcatttttcagtgaggaaactgcccaagacaggacaaatacttaccctaatgcttagcctggctccagtgaaattagctccccagccaaagctgagctggatggaactaacaaggacacacctgctgtccccagccctttcgggaggtggggagggataggaaggagaaaggttttggtgcctattgctgctgatggtgggcatcaggccaggccaggggccttcttggaggctctgggaaaggggaagggaaggccaccgggtgtgagagagagggcacttgtctccttcaaggctgatggaaggtaggatatgtgagtccttcctcttaagtggcaggaaacagtattttctcttttatttcttttttttttcccctggatcctagaactgaggaaacactattttctcatcttactggtttttgggcccctactctattccttttatgcaaacctcacagaattttaaccagaaaggccaggcaggatggctcacgcctgtaatcacagcactttgggatcacttgaggttaggagctcgtgaccagcctgaccaacatggtgaaaccccatctctactaaaaatactaaattagctgggtgtggtggcgcaggcgtgtaatcccagctacttgggaggctgaggcaggagaactgcttgagcccaggaggcgcaggttgcagggagccaagatagcaccattgcactccagcctggggaatgagccaaactgtctcaaataaaaaaaaaacaacaaaaaagaattttaactacggagaccttagatagtagtttgtccttttatgacaggaaaactgagaaggagaaagggagagtgtcttacttaccccatggtcacacaatgcactctgccttttcctattttattcaaattcaaaaataacatgttgtgctttaagctgatttcgtagctcactcactcatcagcgacagccagccatatgaagactgtgagatagagaacttggctagctgcactcacgcatttgcttgaggtgatccaacttatagaataaagtatctagaaaacgaagaaccacttcatctcccatcccccatcaaatgatgcctgtgagactaagtccgaaggggactgatataaaatgcttctgcccagcatggttgtgcagtttgttcactgcacaagggcacttggccaagggagtgagtgggactgaaaatcctgcccctgctccatgctgagccacatacaaagtccccccagtatattgtggggcccttctgggcagacatggagagcttctgaaagtcccacatgcatggaattattttcaagaccccgggtatgtggtctgtggtggtggttctccctgtgattatggactgagatactcatttagtcctaataagaccagagaagtacattgtgagatacgtgggaaacggctgcatcactcactgtcttgtgcatgtgtctccccaggggcattttcagatttctgccatggaggggatgctcttcgcgaagggagagtcaggtacattggaggattcattgctgtggccagggaaagcagaggacatgcaaaattaatatttccctttctatcttctaggatggactttcctcatttggacagccgctctggtttaaagatatgtacaaacctctcagtgccacaagaataaataatcatgcatggaagctgcacaagaagtcatctaatgaggacaagatcctcaacagggaccctgggtaaatgatggggccctcacagttcccatctaaaatgaggagggggtgagaagcttaattgctcctttcaagaatgaaaaccttggcattgttattcttatcccagggacagcgaagccccaacggaggaggaggagagtgaagccctgccataggaggagaacacagcccacctcaggcctcctgcaaaaatacatagaataaacaacaacagttactaaatgaatgaaaattgtgattccgatgaagcctgccagagaaacaaagcattttttaaaagaggaaataaggtgatatctgattagggcaaacatgatgcagacaagaaatgcaccggttcagaggagggaaggtcaggccgcctggggagagtccatgaaaaagatggaacgtgccagatgctgtacctggtgctgggaaagagttgactaggccagcatccctttcctcaaagggggggctcctagactggggggagggctggacatctgaatacatcctgaggagacagtgtgggacagcatggtggcagtggaaccagccgtggttctgctcttggtcggctggaaaggagtagatgtaagggatggtttagaagaagggaagtggaagaaaagttttctgagctgacaagaggaaggaaaggccgcctagaaggacactaaaaaggcaagagaagccctaagcagagtgagcaccagactccacaggttaagggctcagtcacacaggaccatccgcatgtcagaccccaggtgcaaggccaagcatcacctatgcatctgaccaactggctgtaaattggaggtccccacaactccctcctcaggtttgaacatttgctagaacagctcatggaacccaggaaaacagttttcttactagtgctgatttattacaaaggatattttaaaggacacaaatgatgaagccagttgaagagatacacagggtgaggtttggaagggtccttgtggagttggggtgcaccactctcctggaacatggatgtgttcgccaacccggaagctctccaagtcctgtcttttaaggagttttctggaggctttatcacgtaggcatgattgagctccagctctactccccacgccagaggatggggaatggggctgacagcacaacgcttccaaccataggtctttttggtgaccagtccccaaataaggagcccaccaagagtcacctcatgagaacaaaggacgcttctatcacccagaaaattccaagggatttaggagctctgtgtcaggaaccaggtttaaggaccaaatgttagaacaaaagatgtgcaaccataaaaaacagcgagatcatgtcttttgcaggaacacagatggagctagaggccattatcctcagcaaactaagacaggaacagaaaaccaaatactgtatgttcttttaagtgggagcaaaatgatgagaactcataaacaacagacactgggccctacctgagggtggagggtgggaggagggagaggagcagaaaaaactattgggtactaggcttggtacctgggtgatgaaataatctgtacaacaaacccccatgacacaagtttagctatataacgaacgtgcatatgtaccccctaacctaaaagaaaagtttaaaaaggaaaaaacacctaggagaaaagaaaaatgataaattaacaaaggacaatgctcttagcaccgccatcattcaggaatttccaagggttttaggagctttgtgttaggaactgggggcagagaccaaatatatatttcttcttatgttacactaccccagataggaaaacagaaattactctagatatttcaaacaaaaaagggttgtatataggcaattagtgcttatcactggaggtgctagaggtggtgaaggttgtggggatggggttgcaccactggctttcaggctactttaccacagctgatttccagaggatggaagaagtcaggaaacttgggaaaccgctgctgaggtccttgcagccccacggtccccaggctggtgactggtgggggagtatggagtccagctgaccaccagagcctgcacacctgctgctatgggggaggaaaggatgacttctacctcctttccacattccaaattccacgtgactacattttattggcagcaccccgctggcaagtgagccttgatgtgtgcttcctgggcttctggcacctgcacagaaaggggtgaaatgagtgtcacgagcagccaccactctgcatcacacctccacatccaggtgtgctggagagccccacttacacttggagtgtcctggtgccctacccacttttggtaggtgtttgggtgtctgaggctttgcaaaagaagaaggtggggagtctatggtggagtcacatggtggagacctagctaagtcagaggcctggagaggtgtcactggctgggcagcaggtaacacacaatcatcctgagctgattggagaaacacctgggattgattcagagttttttctggaatgttttcactggaatgaaagctgagcggtctgcaggccatatagtattggagaaaacttagccctcattgaaaaaggctgccagagaaaagatatccacagggaaattcaggagttttgtttgtttttttttcttttaaggtggagttttgctcttgttgctcagtctggaatgcaatggcacgatctcagctcactgcatcctccgcctcctgggttcaagcaagtctcctgcctcagcctccctagtagctggggttacaggcatgcaccaccatgcccggctaatttttgtatttttagtagagatggggtttcaccatgttggtcaggctggtctcgaactcctgacctcaggtaatccacccgccctggcctcccaaagggctgagattacaggtgcgagctaccgcgcctggcttgttttgggttttggggttttttttgtgttttgtttgtttgtttgtttttggagacagtctctgtcacccaggctggagtgcagcagcgtgatctcggttgactgcaacctctgccttccaggttcaagtgattctcctgcctcagcctcccgaatagctgggattacaggcacccaccaccatgcccggccaattttttttttttttttttttctaaaaacagtttcaccatgttggccaggctagtcttgaactcctgacctcaagtgatccgctcaccttggcctcccaaagtgctgggattacaggcatgagtcactgtgccccgccaggaaattcagtttctgaaaatacacctgtggatctctagccttgaacacccttggatgctgctttaaatgactgatcctcgatgcctcccttctaactcacactcccctatatcaatctcccagaaaaagggacctcttttattcttttttttttttttttttttttttcagagacgggcctcactttgttgcccaggctggttttgaactcctggcctcaagtgatcctcccgccttggtctctcaacgtactgggattacaggtgggagtccccgcgcccggcaaagcctatattaaacccttttatgcacactcggcggtactgcagagagggcagggaggaagcagaggtgccctggcatcttcagctggaggtgagcagggcgctgagggtgggagaggcccggcgcctggggatgggaggcaggactgcaccttcacagggacgcttccaccctaccccggaggtcagggcctctcgcccagctctggctctgaggtcctggagggagggagatgctgttgcgactcagaagattgggggagggccacccccattcgagaagagtgaaaatcctgagcctgaagaagtggaaccggttggagccgaggctttagaggatggcgttcgaaagagggtctggcgccgccctgtggaccgttcgggctcgcagggccgaaggctccgaagactgagacctgtgaaccatggggaggctccatgcggatgggggccacagcccccgccggagcccccacactagccctggacttctccactggcttacgacatgagagctcaatatgctccttatttaacgcactgttgtatcaggtccctgtgggagccactggctctatagcctaataaaggagcgggtgcacgcactggattggtgagctaccgccactgcaacgcgtcctaatcaaccatcctaaacggcggctggaacaaggttctcgcaggcctgtgcttgggcttgaacgctggtccagccgctgcgctctgtggctccctgtaggcctgcggatcggccagggggctccgttccttttgggcggaggctgaagaagcagcggctgcaccagagaaggccctctgggtgaaggtgggagcgcacggggcccgcggaaccacctaaggcgacttcagacgtgggctcggaactggcagcctttcgtttctgcttcattccaaggccagagcaagccacgtgggcaaacccaaagccaggggacaggaaagtatcctccacccacaacgaaaccatggcaagcggtggatgcaggtacggccaatagtctatctatcccggtgagtgaggagacctgctttgagggttgcacaacctggatctgcttttacagtggtgtctgtcactatgaagactccaccatgggtcgccatcaggtcagggaccctgacaaggcaagaactgcatcttcctctgcacacagctctgctcccttccccgccatgcctaacaccaagcctagccctgagggatgactcaggaatattactgagagcattttaggccattccttcattatccccatgtgacttgttatgaaatatagactgacttcctgaagatcagcacatagtgctaagtatttggcttgtaatctgtagagactctgccatttggagctgggatctgtccccagagctgtcagacaccaaatcccgtatctactgccacccaaagggacctccagaagaaaggggttatacagggtcaaacaccaaggcaggttagtgaaatttctctagaggccatttaaagctggagtctcaccacctgaactgccctcagaggaaggctgtctagggcacaaacctagtcaggggtccacatggacttaaggacaatttttttttttttttttttttgagacagtctcattctgtcatcaaggctcgagtgcagtggtgtgaactcagctcactgcaagtctcaacctcctgggctcaggtgatcctcccacctcagcctcccgagtagcgggaaccacaggctcgtgccatgatgcccaattaattttcttttaaattttttgtagagatgaggtctccccgtgttgctcagtctaatcttgaactcctggactcaaatgatcctcctgcctctgctcctcaaagtcctgggactacaggtgtgagccaatgcacctggcctcttatgaataattttaaaaacaatgaggttcaccgtcagagcccctgctgctctaccaagtcccttggcccctctcaacagggcaaaagcaagatgagccccagatgttctgcttaatgaccacctttcccaggagactttgctctttaaaggagaaccacttagagatatgagcaaccttaaagaatgccaccagcactagtgaatgccaggcacgggccacgtgggtggagagtatactttagggcagtcactcatggtaaattatttccaccagcccccagaagtgactattcaatgtccaactatgtcaggcccaggctaataaaagtagaggcatgaggaacctagggttgttctgaagtgccttgattatggtacatgtggaagattttagagcttgttgtaaaaagtgatgacccatggccccccaggctgggtctgggattccctttgtggattacaagaggatattatacagcagtttttaaaaatgaggcagactgggacaatctatctccaagatgcataggtgctgttaagggaacaaagcaagatttagtagggcgtgtatagtatgctactgtgcgctgtgcgttatctgtacagaactgtgaggtctgatacagtagccactagccacatatggctatttacatataaatttaggttggccacagtggctcatgcctgtaatcctagcactttgggaggccaagtgggaggatagcttgaggccaatagttcaagaacaccctgggcaacatagtgaagccccttttctacaaaaaatttatttatttatttatttttattttttttgagacgggtctcactctgtcacccaggctggagtgcagtggcgcagtctcagcttattacaacatctgcctcctgggttcaagcgattatcgtgcctcagcctccaagtagctgggactacaggcacgcaccaccatacccagcaaatttttgtatttttggtagagacaaggttttgccatgttggccaggctggtcttgaactcctgacctcaggtgatctgcccgcctcagcctcccaaagtgctgagattacaggcatgagccactgcgcccaggcaaaaaatttaaaattgtaaaaatcagccaaacatggtggcattcatctgtagtcccagcaacttaggaggctgaggtgggaggatttcttgagcccaggaggtcaaggttgcagtgacctatgactgcaccactgcactccagcctggacaacagagtgaggccctgtctcaaaaaataaataaataggagtttgaggccatgttcacacatcactgcagtccagtctggtaaacagagcaagacgctgagtctttaacaaaaaaaaaaaaaattttaaagtcagctgctaagacacactagccacatatcaagtgctcaactgccccgtgtggctaatggcttccaaactggcagcacaggcaactgttttcatcactgaagttctgttggacaagaatacctctggaagcacacacgagaaactggtaatggcggttgccttccgggagggaaactgggagagtgcagggctgtatgcccttttgtacctcttgaatttcatatcatgcgtttgtactaggtgtttacaaattattttaaaaacatactgggaattaggaatccccatatggaatcactgcagtgggacactgattcccaaaaaattactttgcaatttgcctaaaacaaattaagctaatagctatcatgatttcatatttaatattttttcacagcttagagtttttttagctcctgttgctatctctctgctcttatgagctcacagggtgacaaagtgaattagtaagtagcaggagaacattaaaggaaaaactcctgggcaacagggcaaaacgccggctctacagaaaatacaaaacattagccaggcatggtggcatgcacctatggtcttagcgacttgggaggctgaggtgggaggatcgcttgagcccggaaggcggtaactcaatcccagcagaatcccagggagcgaaggtggctcatcccaaaagaaaaacaagaaggaaattctattaccagaagacaaagggatgaaatgagggatggagaatcaaagactgaagctactagggtttgtttttattaatatttaattttttcagaggcgagggtctcagtatgttgcccaggctggccttgaactcctggcctcaagcaatcctcctgcctgagccttccgagttgttgggattacagatatgagccactgcatccaactttggttcttgtttgtctgttttgttttgttttggtttgtttttttgacagagttttgctgtgccacccaggcagtgactcagcctcggctcactgcagccttgaccttctggcctcgagtgatcctcccacctcagcgccaccccccactgccctccaatatctgggactacaggtgcgcgtgaccgcacacagctaatttttaaattttttgtagagatagggtttcactatgtggctcaggctggtctccaactcctggactaagcgatctgcctgccttggccacctcccaaagtgtgagccaccatgcccacccattgaacattgaagctagactgggcaaacccttaagcctaaaccagtaacagtttttcacaagttcatagatgttactgtggttaataacacacaaattcatttaaaagcatgtgtgtccacatagtaatttttggtccttatttttatttttatttttcagttaatggatattaaagatacaactttattttgttttttttgagacagggtctcactctgtcacccaggctggagtgcagtggcatgatcagagctcattgcaacctccacctcctgggttcaagagattctcctccctcagcttcctgagtagctgggattgcaggtacatgcaaccacacctggctaatttttgtactttttgtagagatagggttttaccatgttgctcaggctggttttgaactcctgagctcaagtgatccacctgcctcggcctcccaaactgctgggattacacaagtgagccaccacacccggcctaaagatataatttctatcatgaggaggtccaagaactattctctttttctttttttaatgttagaaagggattaactgggtatgtgctgcagcaaagggaggggaaattaagcaagaagagaagggagccaggaaataaaggccccaacccaggaagcagttaagcaaagttccaggatgacccatgtgacaagtttaggggataacttgagcacatggaggacagaacttggagagggcactgtgggcctgggcgccacctgctccgccagagcactggaagagaacgagggcacgataatggcagatggcactgaaagaaaaggagagagcttgaggcacccttgggggaagcagccatcatcagagtgtattttatttttattttattatattttgagatagagtctcactctgttgcccaggctggagtgcagtggcatgatctcggctcactgcaacctccacctcccaggttcaagtgattctctgcctcagcctcccaagtagctgagactacaggggggcaccaccacacccggctaatttttgtatttttagtagagatggggtttctccatgttggccaggttggtcttgaactcccgacctcaggtgatccgcccaccttggcctcccgaagtgctgggattacaggcgtgagccaccatgcctgacctcacagcacattattaagctctgtggtgaataatatttatatagtcacaattctgtaaacactgttcattttctacaaattgtggcaaacccaaacctcaagaatggacagggctagggtgtaaaagagctaagtccttgccaggtttaccaggaaggcaacagacagtgtctaaaactatgagacagctgggcgcggtggctcacgcctgtaatcccagcactttgggaggccgaggcgggtggatcacgtgaggtcaggagtttgagatcagccttgacaacatggtgaaaccccgcgtctactaaaaatatcaaattagctgggcatggtggcaggtgcctgtaatcccagctattagggaggctgaggcaggagcattgcttgaacccaggaggcggaggttgcagtgagccaagatggcaccatgcataggttttatgccaatactacaccattttatatcaaagccttgaatatccaaggattttggtatctatgggaggtcctggaactaatcccccacagataccaaaggatgagtatacaccttttcttactttcgaattttgaaccagacagatacgctgcaattcaacaaattaaaataactgaacctacaatcaaggagaaaaatatttatccctaataactaatggaccatcttacgccgtctataaaaatatcaattaagaaatcacggccgggcacagtggctcacgtctgtaatcccagcactttgggaggccgaggcgggcaaatcacttgaggtcaggagtttaagactagcctggcaaacgtggtgaaaccccatctctactgaaaatataaacaaattagccaggcatggtgacgggcacctgtaatcccagctactcgggaggctgaggcaggagaattgcttgacccaggaggtggaggttgcagtgagccgagatcacaccacttcactccagcctgggtgacagcaagactccgcctcaaaaaacaacaacaacaacaaaaaacgcggtgatacacgcctataatcccagcactttgggaggccaaggcgggcggatcacaaggtcaagagatccaagaccatcctggccaacatggtaaaaccccatctctactaaaaatacaaaaattagctgggcatggcgcgcacctgtagtcccagctacttgggcggctgaagcaggagaatcgcttgaacctgggaggtggaggttgcagcgagccgagattgtgccactgcactccagcctggcgacaaagcgagactccgtctcaaaaaaataaaaaagaaatcagaaactgttcaaattccaatctatacaagtgaaacctacacagttaaatgtcttaatagagagctaaaagcattaagttctgtcatactcaacatactgatgaaaaaaatttgaactaaaagacagcctgatctttagaaactggcagaaaaaataggggctgcatccaagaccactcacggcacgtccattcttccagcagctcccaactgctattttatgaaaagtccaaatttcccaccccaaggtcctagagtacagccagctccctaccatcaaaaacaatagctaccaaaactcagtaaaattaggcttgttatgaagagaagattgaagaaataaaggtatttatttcatcttggtatttgaatgtggaaactcccagtagggtaagaaaaaagaattctgccagagaaatgatgaagtgaaacctcaaacaatttgggcttttgagtgcctactgtcatccagccacgaaatgaagcattttacataagtaatttaagcccagtgatgcaggcagtaagtattatctccattttaagatgaggaaattgagacagacgagattacctaactctctcaaggtttcaccacagagctgtggttcaaacccatgtgttctagttttattacagttaagaaactgcaagagtttgccaatttgtcaagtgccagtccaagataaatggacactctgagtatcaaaaaaatacataatctgcagatcaaaacacgaagatacaaacatctaagagtcaccatggaagttgcggggcatccagtggtttttctgaaaatccatgaaggaaaagaataaagcatttttccagcctctcttctacaaactatatttcagggaaaccaaatatttgatgagggaattctttgtttagaaggattttagctaataaatgcagaggaataacaagatttaggaggggggagaaatcaccattttgtgacttctaataaaataatgggtctaggcaacagttttcaatggatgctaaaacgattaggtgaaaagttgatggagaattttaattcaggggaattaggctgataccatctgaaaccatttggcatcattaaaaatgtgacaacctggtggctgccagggaggaaggggagagggtgggggaagaacagaagttatagtttatgggcacaaagttttggttttacaagatgaaaatagttacagaaatgaatggtggtgatggttgcagaatattatgactgactatacacttaaaaatgtttaagatagagctgggtgcagtgttgcacacctgtagtcccagttatgcaggaggctgaggtaggagaaccacttgagcccatgagttcgagaccagtctgagtaacatatagagacctcatctcacaaaaacatcactaccacaaaacaaaacaaaacaaattgttaagatgctaaattttaagttatgtgtattttaccacaataaaaaaaaatgaggccgggtgcagtggctcatgcctgtaatcccagcaccttgggaggccgaggcgggtggaccacaaggtcaggagttcgagactggcctggtcaatatggtgaaaccctgtctctactaaaaatacaaaaaaactagccggacgtggtggctcacgcctatagtcccagctactcgggaggctaaggcaggagaatcacttgaacccaggaggctggggttgcagtgagccgagactgcaccactgcactccagcctggccaatagagggagactccgtctcaaaaaaaaaaaaaaaaagaaaagaaaacatagttacccagcaattccacttctaggcatatacccaaagaactcaaagcagggactcaaacagatacttggacatgaatcttcatagcaacactattcataatagacaaaaagcagaagcaactcaagagtccatcgatagatgaatggataaacaaaatgtggtatatccataaaatagaatatcattcagccataaaaggaattaagttctgatacatactacagcatagatgaaccttgaaaacattgtactaagtgaaagaggccaggcagctaaacttccaaagactaatatacaattccactgaataggcaaattcatagacagaggatagaataaaggctaatgaggggtgggggagaagagaatgggcagttattgctaatggatacaaagtttctgttggggatgatgaaaaaattgtggaactggacagtggtgatggttgtaaaacacggtgaatgtacttaatgccactgaattgtacacttaagaataaacttgtaaattttatattatatatactttgccacaataaaaatttttttaaaaatgtctaagtgtgacaaccgaacttctgtgttaggataggaagaatacttatgaagtattcttgcccctgaaatgaaccaaaatctaatcaagtctctagaataaacaaccagttcacaggaaatccacagatagccaagcaagttagatggcactataataaagtaatcaaccaaatccagaatgtggaataagcagttaaaaaaaaaaaaaaaaagagggggggaggccaggcgaggtggctcacactatggtctcagcactttgggaggccaaggtgggcagatgcttgagcccaggagtttgagaccagattgggcaacatggtgaaaatccatctctataaaaagtacaaaaaaatttgctaggtgtgatggtatgcacctgtggtcccagctacctgggaggctgaagtcagacaatcgcttgactccaggaggcagaggttacagtgagccaagattgtgccactgcacgagaccctgtctccaaaaaaaaaaaggaaaaaaaaaggcatagagaaagaacaactgctgtagaataaaagactaaagaggcaaaacaacaaaatgcactgtgcgaactctgatccagatgcaaacaaagcagatgtagaaaagatgtagaaaggatactttttttttctcttttttttttttttttttgagatggagtctcgccctgtcgcccaggctggggtgcaatggcgcaatctcggctcactgcaacctccgcctcctgggttcaagagaatctcctgtctcagcctcccgagtagctgggattacaggcatgcaccaccaagcctggctaattttttttgcatatttttagtagagacagggtttcaccatgttggccaggctggtctccaactcctgacctcaggtgatccaccagccttggcttcccaaagtgctgggattacaggtgtaagccaccacactcagccaggatacatttgatacaactggagaaattagaataaggactaggtgctagatattaaagaattattattaattttggagatgttataatagcatgaagattttatatatatatatatgccttatcagttggaaatgaacactaaaggacatgtgaataaaaggcatcatgtctgggatgggcaaaatgcttataactgttgaggcttggtgatgggtacatgggggttcgttatgttatcctctctgtctttgtatttgttttagattttccactaaaaaagttaaaaaaataaatgcactactttgagaaaaaacattctaaaatctatagcctggaaaagataactgcaaatagagttaattgccaaaggtaacagctaaaacaatgatataaaatataaagggacagtcgacttgggtatttcatctggaaagactgacgaatatgtaagtctttactatcaagtacatgcaggagaatctccaaaacaaacagactccaaataaattctaaaatgagaaatttgtagattccatatggttaatattttacatgaaaatcggggtgtaaaaactatagtcagccctctgtatccacagattcaacccaccttgaaccaaaaatattaaaaagtaataacgcaagccggacacggtggctcacgcctataatcccagaactttgggaggccgaggcgggtggatcacctgaggtcgggagttcgagaccagcctgaccaacatggagaaaccccgtctctactaaaaatacaaaattagccgggcgtggtggtgcatgcctgtaatcccagctactcaggaggctgaggcaggagaaccacttgaacccgggaggcggaggttgtggttagccgagatcgcgccattgcactccagcctaggcaacaagagtgaaactccgtctcaaaaaataaataaataagtaaataaataaaaataataacgcaacagtaaaaaaaaaaaatacaaataatacagtctaactatatagcatttacatgctagtagacataagaagtaatctagtagtgatttaaagtagacaggggggctgggcacagtggctcacgcctataagcccagcactttgggaggccaaggtgagcgaatcacctgagatcagaagttcgagaccagcctgaccaacatggtgaaaccccatctctactaaaaatacaaaaattggccaggcgtggtggtgcatgcctgtaaccccagctacttgggaggctgaggcagaagaaccacttgaacctgggaggcggaggttgcagggaggcaagatcacaccactgcactccagcctgggcaacagggcaagactctgtctcacaaaagaaacctccccagtaagtataaagagaccctaagagaggaaatggctgacagtgtaaatagagcagagcaccagaaggtatcacttcaagcatccgtctttagagacatttcacagaaacagtatcgaggctacaaaccgaataatctttaccttttgtgttctggaaaaaatgctgccacagaggtctgattttgaagtggctgccaacatcccagacagcgaaggtgttatttttatattctactgtctccacacagaaacctaaatgaaacatggggaaaacatttaattatgatttgtgctggttgaacaattcaaaataatttcaacatgcggacagtacttttaatttacaaagcagcctgctagtcaaagatctatagccttcaaacagaatgtgctggccccctcgcccattcatcaggacaggtgtctcaaaccttctctactctccaatctctagccacgcacctgccctttctctcagcaggagactatcacagtgtacttcagagcagagaagccgccgatgggaatgacttccacttccaccatacagtgtaaaagccagtctacatctttacccatgcttttcttcctccctcttggaacaacagaagaaggtaactctcttccaccaactccctccctctatgagccagatccaccctacccagactgtctggaactttttactattcctattctctcccatatctgaatatctccaatctgttcaccttggcatgcttaagccttttacatctttaaaaacaacaaaacaaacctttccttgatccccacatcttcatcgcactctcttccttcacatcttcaccctctatttgctttttttttttttaagagacagggccttgctgtgttggccaggctggagcacagaggtacaatcatagctcactgcagcctcaaactcctgtgctcaagggatcctcctgcttcagcctcccaagcagctagaactataagcatgagccaccatacctagctaaatttaaaaaattttttgtagacacagggtctcactatgttgctcagattggtctaaaactcctgaggtcaagcaacctgtccactaagctttcttcggtcctctcacgcaacagcaccttagctctgctccaccattgggtagctggttttcagtaaggtcagcagtgatcaccaggtcaataaatctaacacaggccttctcagttcttccataatttgatcttctatctgacgctactgctcactccctccttgacacccttccccagcttcccttttccttctatctctatggctgtactgtctcagtctccttagtgaactcagccacgtttaactgatcctgcaatgatgggagtcgccctggctctcactggccccatccactctcctctttctgcacccctccctaggcaatctcactcactcccacgacttcattcctatctctgtactaactctgagatttatatcccccaacctagccctctctcctgagcttcaggctcataatctaacagctttggcaaatgtcttcaaggccccaaaacaaggtgatcagtcaaaaatggaatttaaggtccctacccccaacctcctcctctgctagttatcccatcattgacttcgttccacaagctgatagcctgagaggtgccctggaaacatccgatgctcgcacccctagaaccctactaccacaccttatcaattcaaccccttcaacaactaatagtcaccctaacccaacagaccatcatttctagcctcaattcctgaaaccatataactaatttcacctcagccactctccctctctccatccggtcaccatcttctaaacaaagcaatagcttaaaaacacatagtgtggtcacgtcatttctctacacatttatgtttgattggaatattttcaaacttaaaaaagaaagaataatcgccccaaaaaataaaattaaaaattaaaaaaaaaagaaagaataagccgagcacagtagctcacacctgtaaccccagcactttgggaggctgaggtgggcagattgctttgagctcaggagtttgagaccagcctgggcaacatggtgaaaccctgtctctacaaaaaaacacaaagattagccaggcattggtgccgtgtgcctacagtcccagctacttgggaggctgagacaggagaactgcttgaagcaaacattgcagtgagctgagatcacaccaccgcaccccagcctggatgacagaataacatccaagaaagaaaagaaagaaaagaggaagagagagacagagagagagagacagagatgggaggggaggggaggggaggaaggaaaggacagaaaagggagggagggagggagggagggaggaagggaggaagggaggaagggaggaaaggaaaagaaggaaagatgtccccttagcggcttcccacacccaaatcccaaacatgactgtcaagacccaagcaagctgggtctgctcaccttccaaacctcaattctagtcatgccttattttagtgagagacactcgttacattgcaacaatctaaattcttgctaaataaataaatacaatgccattccaatcctataatgatggtaggggcaggggcaggaaacttagcaaaattatctaaaatttaacctggagaaataaacaagtaagcataaccaggaaatctctgaaaatgagtaatgaattatttttaaggatatgccaagccctagtaacacttgaatagagttcaaatataaatgcaacaggtacttgcccaaaaaaagacacacataccagtgagaatttagtatgtaacaaagaaggcatttcaaatcagcatggaaaaattattcaataaatgacattgaacaactgtctaccccagcaccgtccaatacatagtcactagccatttgtgactatttgtttatgtttttgttttattttgttttgtttttgagacagagtctcgctcttgtcacccaggctggagtgtatggtgcgatctcggctcactgaaacctccgcctcccggattcaagtgattctgctgcctcagcctcccaagtagctgggattacaggcgcctgccaccacgcccattttgcaattttagtagagacggggtttcaccatgttggccaggctggtctcgaactcctgacctcaggtaacccgcctgcctcagcctcccaaagtgctgagattacaggcgtgagccaccatgcccggcctatttatttattttttgagacacagtcttgctctgtaacctaggttgaagtgcagtggtgcaatatcagctcactgcaacctgtgcctcccgggctgaagtgattctcctgccttaacctcccgagtagctgggattacaggtgcatgccactactaatttttgtatttttagtagatatggggtttcaccacgttggccacgctgatctcgaactcctggtctcaagtgatcttcccacctcaacctcccaaagtgctgggattataggcataagccactgcgcctggcaacgtggctatttaaacttaaagttaaaatcaaaaatcaatcaataaataaaaataaataaaaaataaacttaaagttaaatacaattaaaagttcagttcccggctggacacagtggctcatgcctgtaatcccaacactctggggggccaaggtggacggatcacccgaggtcaggagttcgagaccagcctggccaacagggtaaaactccgtctccactaataatacaaaaattagccgggtgtggtggcgtgcacctctaatcccagcttctcaggatgctgaggcagaagaatgacttgaacccagggggcggatgttgcagtgatctgagatcgcgccactgcactccagcctgggtgacagagcaagattccatctcaaaaaacaaaaaagttcagttcctcagttgcattagccacatttcaagcacatgaacagtcacatggctattggctacgacactaaacagcacagacacagaacattttaatcactgcagaaagtgcctcctgggcagcactggcttatccatttgaaaaatttaaccaaattactaccttacacacaaccatctcataactcgaacattctcctcggtttcccactcctcaatcgatgcaatctctgcagctactgcccaagttgaaagttgatcatttggagaccaggtgcggtggctcacgcctgtaatcccagcacttagccgggcagatcatttgaggtcaggagttccagaccagcctgcccaacatggtgaaaccctgtctctaccacaaatacaaaaattagccttgcatggtggtgaacgtctgtaattccacctactcaggaggctgaggcatgagaatcgcctgaacccaggaggcggaggttgtagtgagccgagatcgcgccactgtacttcagcctggggtgacagagcgagactctatctcaaaaaaaaaaaaaaagaaagttgatcatttgagtcctgtgcctaattcaatattcagaacagaacagtagtaatgttcacatgccacctgtggggtgtatcctcagtcagaagtttggatctagaggcagttcacaaggcaaagattcagttctgtcaaaactcgctttgtaaatctcttaacaagccggtaaaacacagtgctggttcacagtaagagcagtgcagccagcttgtctatttctctagttggacatcatctcaagcagttggtttgagccagagtgaagaaaagaaatcacactccatctctaagcactgggagcgtacttggtgtagagatgagatgctgccactaaggaaggccagctggaacagaggctgactgaggaggcaccagcagattcccagctcccacctcagccttctgctgggacactagctgcgaggaatgaggggcagaactaccctccctgttttgcccattatctttttcttttttgccaagcaaatggggttaaatttgcttagcctccatgtgttcacatgtctcccttgtgaacctaagaatgtgcaagccactagaaaaggatacataacctggccaggcgcggaggctcatgcctgtaatcccagcactttgggaaaccatggcgggaggatcgcttgagcccaggagttcaagaccagcctaggcaacatggcaaaaccccgtctctactaaaaatacaaaaattagctgggcatgctggtgcacgcctgtagttccagctactcaggagggagatggaaggatcacttgagcccaggaagttgagactgcagtgagcagagatgtaccactgcactccagcctgggtgacagagtcaaaaaaaaaagaaaaggatatatataacctggtttttggcctctaaaaatgtatgctcatggagtagacaagatttttaaaaagaattattcaataacataagaagcatgtaaaaataaaacatatttctctggtgaaacagaacctaaaaaatatatataacatactaaattgtaaactggaattgccacaggtctttcattaacttacctactgtagggacggcaggcacagtctcccccagcttcaatttatacaagatggtggtttttccagctgtatccaaactcaatataagaatccgcatcttttttttcccaagtagacttttaaagagcttttcaaaaatgtttcccattgtaatttaatcgaattctgtaacatgacaagaaaagcaagccaaataattgttctctgcagagatatagaagcaacacgcagaaaatacaagtgtcaattagaaatggctcccaggaaaaattcaacaattttaggtacactttggccaatgagtagtgagtcttgtcttcaaagggaaactcaactaaacctttccatgccttaccagaaaattctattttccactgcagcatccaagagggatatgcaacatagcctcagcactgctatgacagtggcagcctttagtcatttagtacagaagtacaaggccaggtgcggtagctcacgcctgtaatcccagcactttgggaggccaaggtgggtggatcacctgaggtcatgggttcaagaccagcctggccaacatggtgaaaccccgtctctactaaaaacacaaaaattagctgggcacggtggtgcacgcctgtagtaccagctactcaggatgctaaggcataggaatcacttgaacctggggaggcagaggttgcagtaagccaggaccacgccactgcactctagtctgggcaacagagcaagactgtctcaaaaaattaattaattaattaattttttttaaaaaacaagtacagaagcaatgatacaacaaatacaactatacctcattctaaattctactgaaatgagaatttatgaaacagagaagctttttattttatgcaatataaaacaaagtctttaagacaggttaaacaacaatatcccttggaaacgtagtagttccttatggctagcagacaccttggaaataacctaagaaatttcagaggcaaagaaattcagcgttgggaagcttcactgccaagagagataacttggcagagttgaggaggcaccacagcatccagttttcgtttgagttttttgttttgttttgagacagggtctcgctctgtcacccaggctggagtgcagtggcacaatcacggctcactgcaacctcaacctccccatctcaaacaatcctcccacctcagcctctggagcagctgcgaccacaggcatacgccacctcgctcagctaatttttgtattttttgtggaaatgaggtctcactatatttcccaggctaatctcgaacccctgggctcaagtgatcttcccacctcagcctcccaaagtgctgggattacaggcgtgagctaccaggcccagccagtatccagtgttctattgctgtaactatcaccttactctcaaccagttcttagaactttttatttaagtataatttacatacagatataaacatacatgataactgtaaagttcaatacattttcatgaaccaaacacacctatgtaaccaaatcaagaaaagatgatttatcaggctgggcacagtggctcatgcctgtaatcccaacactttgggagaccaaggtgggtggatcacctgaggtcaagagttcgagaccagcctggccaaaatggtgaaaccccgtctctactaaaaatacaaaaattagctaggtgtagtggcacacacatgcagtcccagctactcagaaggctaaggcacaagaatcacttgaacctgggaggtggaggttgaagtgagccaagattgggccactgaactccagcccagggcaacagagtgagactccatctcaaaaaaaaaaaaaaaaaaaaatgattatcagaccaattctccttgtgcctcctcccagtcattactccataaaaggtaatcactatattgacttctaacagcataaatgttcaatattttatttttcagtagaaatcatggtaggttatataaagtaagtcaatagtaaagtcagactaacttacagaaatttacagtctctttgagatcagcctacttgaaatgtgagcttgacattctaagtaaagacttacaagcagtgctgggtctacacctctaactaagctcttggaagtctgtaaagatcttcagaccaggcagggtggcttacccctgtaattccagcactttgggaggctgaggcaagagggtcactttagtttttgcttactgagataacagaagacaagggaggattgctttaggccaggagtacaagaccagcctgggcaacatagcgagaccctgcctctatttttaaaaataataaaacaaaaaaaaattcaaaaagaaaaagacatacatccttgttccagagactgtgatttattttctttttaaattgctaaccaaagaaagctttactcctgggcaggggaggaggaagacacaaggaggatagccaatctcccattcattcggactctggtaaccacagagcggaggtaaccaaattccacaggcctcaccgctgaaattcaacagtggccagcagtagcttaatatcatggattacgcccaagtacacaacattcctttctaggatgagagaaagcgagcacagaatttatcctgttcacaaatgtggcgtaagtgaccaaagaatgataaatgttttaatcattcaaagaaagtccattataggtctataaaagtccagtgcattgcagcactcaaaatcttgccgggcgacaaaactagagattccttttctttgtttcgaaaaacaaatctcacagatgaggagacttttcaggaacatgctgggggagggaaggtacttcccgctcagatgccccttgaggcagctagtcccaattccccctgccaaccgcacagacacaccaccttgacctccctctcccttctctttcctcttattgctactcatgtgccccaggcgcccgtggtcctgacacccctgcgccgctggagacccctctaaggtaagatggctccgactacagggcctttttggcacgctcagtctcccagccccaagcgccaaaagtgcattagggagaaacgtcggcacgacgtcaagggcgcgaacaagcgtggtggcccaggtgagcgtgcgcggcagccaggcacgcccggctcccggggaaagacgccccttttttgccccggctgccaggccgctccttctcaacttgtgcgcccctggaagagcaaagagagggccctgcgtggaacctatgaagcctccttcggttcctcgctgctccggccctagagagggcgaagaaggaacagcggagcccaatccctttccgaaagccaccgccgccctccagtttctggcccgcagacgaagtggagatccagccaggtcttgagtgctgccgccccatccctgcagccggagactcacctgttgccactcaaggtaccgctacctacaacaccgccgactccgcggcctttaggatttcagctcagttcagctaaaccacgacaggcgtgggggcaggaacagcaaccaaccaatcacccaccgcctcctggagcttttgcaccaatgagctcgaagttttgtgagtgacgacatatctggccaacgcaaagaagagtaagggcctgggagggagggagcgccgtaggcgacgccatgaagctctggcaataccatgttcatcttcaaatcacagttaaacgaattctggcgagacacgcccacgtcccccacccccgatgccatgtgcgaccaatcagaaaagcaaaaggattgtctatttgcacggccaatcagctgggaaaatcgccgaggtttgagctaacctcggagcgttcacaccaaccgggaggggacatgtgggccgggccaagttaatagtgccatggaaggaaatttaccgcggttgagttaaacgtagacattagtttggggcggtgttccgcgtaggaaataccacacactgacactgaaattaggcataaggaagttttcctattccgcctgaggctagactgccctcccacctctacacagattttcaagttggggaaaatactggccacccgcacctcgttaagacgtcgcagaaccagtcctcgtttccgagaaatgctttctatagtcagttccctaaatgcccaacttgttagctaaaaaggttacaaacgcctgtaaatggtacataactgaaatcatcagaacaacaaacatctattaaacatatactatgtgccagaaactatatcaagaacttcagcaggcccggcgcggtagctcacgcctggaaggccaaggctttgagctaggagttcgagaccagcctgagcaacatggcaaaaccccatctctgcaaaaaaaaacaaatttaaaattagccgggcatggtagcggctgtagtcccagctactcgggaggctgaggcaggaggatcacttgagcccaggaggtagaggctgcagagagccgtgatcacgccactgcactccagcctgggtgacaaagcgagaccctgtctcaaaaaacacgaacaaaaaaagttagaagatactgctagaattgactaaataaataaataaataaataagaaaaacaatgttacctgcaggaccgtaacgcccagtgaattacaaactattatccctggccagacgtggtggctcacacctgtaattccagcacactgggaggccgaggcgagcagatcacctgaggttgggagttcgagaccagcctgaccaacatggagaaaccccatctctactaaaaatataaaattagccgggcgtggtggcacacgcctgtaatcccagctacttgggaggctgagacaggagaattgcctgaacctgagaggcagaggttgcagtgagccaacatcgtgccactgcactccagcctagacgataaagcaagaccctgtctcaaaaaaaaagaaagaaaagaaactattatccctgctgttttacagaaaaatattaagtagcctgggtctgtcccactcccacaccttaatctttttctttctttttccttttttttttttttttgagacagggtctcactgtcgcccaggctggagtgcagtggtgcgatctcggctcgctgcaacctttgcttcccaggttcaagtgatcctcctgcctcagcctcacaagtagctggcattacaggcatgtgccactgcgcctgcctaatttttgtatttttagtagagacagggtttcaccatgttggccaggctggtcttgaactcctggcttcaagtgatccacccacctcagcctcgcaaagtgctgggattacaggcatgagccaccgagcctggccaccttaatctttttaagcaaatacagaatggaaactgccctcacaggattaaggagagttacaagccaggctttaggcagcattatatatagttagctgttatccagggtgcacaagtgtactttgacccacttccctgcagctgctaactcactgaacatcactccacgtgctagaccacctcctacctgtttctccatggttcttaccatgagtaagaatttctgacgctagactcataagatcgttttgcccaagaacgggttgtttttcagatcctgaattctgacgtccccaaccaaggaacccactcagcacaagaatgaggtttcttggtctccctgtctcatgacttcgcccttcacttcttgaccaatcatcgatccccacactgcagcccctgtccagaggacttaaaaaccctgccccccaaacctctcagggaggtggatttgaggcttcttcccatctcctcattcagatgccctgtgattattaaactctttctttgctgcagccaggtgtctctgtatgctgactcactgtgcattgagcaaacaaaactattaaattacagtactacttactcttctaattacagtgcttatatgtatgagggttaatataaatacatatgactccttaaaaattaaagtatgttttttctgactataaaaattatacataaccgggtgcagtggctcacacctgtaatcccagcactttgggaggccgaggcgggcagatcatgaggttagatcaagaccatcatggccaacatgctgaaaccccgtctctactaaaaatacaaaaattagctgggcgtggtggtgcattcctgtaatcccagctacttgggaggctgaggcaggagaattgcttgaacccgggaggcggaggttgcagtgagccgagatagagccactgcactgggtgcagagcctgggtgacagagtgagactctgtctcaaacaacaacaacaacaacaaaaaactcatgctagtttaattttcatttatttgatgacttgctatttttccaaatgtttactagtatttttatttcatctattagaaatgatatattcatgtcctactgacttccaagggaaagatagaaagttgttttgccaggaactatgaaggttgtttgaatggagtcatcataacctaaaaaaaaggtgaaataacgaaggtgagatttttacttaccattgtttgttcctacagaaggaatgctggagctgataattatgagaatttatccttccatccctcatagcctaagaatattcattattttcccaatatctgcactgagcctgtaaaccaaaatgtatctgagacatgtctcaatcaatttacaagtttattttgccaaaattaaggatgcttacctgggagacaggcctgtgcctttttccaaaggtgattttgagggatttagtttggtttgtttgtttgtttttgagccagagtctcactctgttgcccagggtggagtgcagtggtacaatcttggctcgctgcaacctccacctcccaggttcaaatgattctcatgcctcagcctcccaagtagctgggattaacaggcgcgtgccaccacttctggctaatttttgtgtttttagtagagacggggtttcaccatgttagctaggttggtctccaactcctgacctcaggtgatccgcccacctcagcctcccaaagtgctgagattacaggtgtgagtcaccgcgcccggccagaaggatttaagattttatttatttatttatttatttatttttatttttgagacagagtcttgctctgtcacccaggctggagtgcggtggcacaacctcggctcactgcaacctccgcctcctgggttcaagccattctcctggctcagccgccccagtagctgggattacaggcgcacaccaccatgcccagctaatttttgttgtttttagtagagacggggtttcaccatgttggccaggctcgtctcgaactcctgaccttatgatccacctacctcggcctcccaaagtgctgggattacaggcgtgagccacggtgcccagcaaggatttaatatttaaaatggaaaagcaggctggaagggaaagaaggagagtatggtcacattactgaattcacatgttgcaagagacaaggagcaagtaggggaatagtcaattatgtattactctcgtgcttaccataagataaggtggacatagagtagttagctgcagtcagtcctgcttaggaatgaaaggaaaggcaacttcttgcatgactcagctttcagcttaaatttttttcttttggcagaatgaattgggttcccaagtttttattttcctttcacaagcctctgaataaacaaagttcctgcccacatggcattcaattgctaaacaattataatcacataaatacatacacatatacgtatatgttttatatatatatatatatataatatatatttaatacatacgtccgggtgcagtggctcacacctgtaatcctagcactttgggaggctgagttgggtagactgcttgagccaaggagttcaagcccagcctggtcaacatggtgagaccccatctctacaaaaaatacaaaatacaaaaattagctggtcatggtggtgtgcacctgtagccccagctactcagaagactgagatgagaggactgcttgagcctggaaggcagaggttgcagtgagccaagatagtgccactgcactccagcctaggagacaaagtgagactctgtctcaaaaaacaaacaaacaaaatacattcatatagagagagaaaaagagggagaattttataatgatatgcatgaggaatgtataggggaagaggctaaaaataggccgaacttactagtgaatatattcaggaggtaggactgtgattgtttttaagtgatcgagggaaaatagtgtactgattttaaaatggaaaactcaacttattttttaaaaattaaaactctgacaagagggaggtttaattgaaatcacagtggctgctcagggaagtttataaatctcgaactgcaacgactcaataagcatgaattgcttgtgatgatattgacttaatagagttattttttccttaatagaaaacacatcttatcaatataatgttatttgtaaagcatggaaaggacaaagtgctcttgggagaagtagaaagagaatttcactctgagaaacctatttggagaaagctcctcatctctggcttagactttaaaattagttaatagtgtaattagggatagttgtagtaatagtggtattggtatggtagttagagtttaaatgtcacacagaatacccagaccaccttcccccaagtgccactaaacttattcttctaatcaaacctctgctcaagggatgtcttcttcctctcttggaaagctgtgttccttacctcagaaacagccctccataaacctgcccttaagagaatccttggccaggcacagtgattcacgcttgtaatcccagcactttgggaggccaaggcgggtggatctcttgaggtcaggagttcgagagctgtctggccatcatggtgaaaccctgtctctaccaaaaaataaacattaaaaataaaaaaattagccaggtatggtggtgcgtgcgtgtaaatctcaactacttgagaggctgaagcaggagaattgcttgaacctgggaggcagaggttgcagtgagctgagatcgttccactgcactccagcctgggcaacagagcaagactccatctcgaaaaaaaaaaaaaaagagagagagagagaatccttaagacatgccttcttggatgccctctggagaaatgtcaagagtagccaatatagtcaccccagtcggctgtggtgtgtgggcctctagtgttttaaggttctaggcaacttagcccctcccaggagatgctgatttacttttctcaaggtgcataaagtctcatcacaccaatatctgaaaaatctcttttcaaagagatgcaggcagccttccagccccatgatgttaatacacagggttaggcagcctggcaagtgcactggggcccccactgaaggatcatctggtttccatagcaacagtccttcctttccacggaggattctatcatctctcctgctcactcaggctttccagaatgaattgttttttgtgactataggtgtttgtccttgatcctgcaaagagaaaagacatattcatttaaaacaaacaccccccaccccgccccgcaactgactgcagctagaatactgcattgcatcagctggtcttcctttcatttaaaaattccatgtcctttctccattttgctccgttctctagctttatccatcattttagaaaacaggtttctctgacagaaaacaaacagatggcaactccatcatcctaaaactggctgtgacggggctctaaaattaagtgttcatggggctcccagaaagcctaggcttgcatggtatgtgtggctgacctgtgagttacgattggaggggcaagagaaggctttctatacacagatggctccccatacagtgtcacagtctctgaagtgttgccttttgaggtttgttttcttaggtcaggcactgctgtcctgtcagtattttcctaaattgccaatactcctgggaagagtaatacgttaggttactaatactgaaagaacttgggaaagagaggagggggtgcagcgggaagggaataaaaggggctctgaagaccacctttgtgtgcttcacagtgacatcttctgcaagaggggaagtgcaggtcttcatctctctctttgtctctctctgtcacacacacacacacacacacacacacactgcaggacgccttctgacaattacaatacagtagtgaattcaccgaacaggactgttccctgaaacacctacatacaatcccgctggaagacctttgaaacagccctgcagtgactaaaaactctgtccccagtgccacttgtttaaccctacagtttccacagactaaaggtagttttcctttggttaatatgaaaacaccaaatagtcagattgctttgttaaataaagtggattacggtgaatctgttcacttctatgttttatattgccctcactccacaaatcacagaagatatttatttttcccccagttaaattctgttaccacaaccattacaaacaaatgtctatataaccaaaatgttagtcagccccattccaatggagcacattttaagtgatgtttaatgggacataatttgaacataaaattctatctgtgcactgttttcaagtctttgaatcaggcctccacctatagatgttggttacctatcagggagcaacaggtgatgctaaggatcactttgtaaaaaccaggaatcacatccctgtaactgacaggaaactgactatattcatcagggttctccagaaaaatagaactaacagaatgtgtatatacataggaggaaattttgtttaaggaattgactcgtgtgatcgtggagactttgggagcccaaaatctgatgggagaagctggcatgcaggaggcccagggaagagttacagttctagtccacaggtaacctgctagagaattccttcttgttctggatgagtttggccttttgtctattcaggctttcaagtgattggatgaggcccacctacattatggagggcaaccttctttactcaaagtctacagatttaaatgtaaatctcatccaaaaacaccctcacagaaacatccagaataatatttgatcaagtatctgggcaacatggccaagccaagttgacacagaattaaccgtcacactggatcacaagggctgtgttcagcaagaactgaccttggtcaaaccctgcccctgcccttatgccccactcttcttcattctgggtcctgctatttccattttatcatgtcttcatcttctttccccacctttcaggtacctttcctctctgaccctatccctagactcacctcctaccccccactcaaagcccttccttccttaaaaaatgatgttagtcattacactttaggatttaaattaatcattctgttagccgtcttactaactttctcactgtgaaaggaaagcatattaaaagaatttcagggatcgacgaagagctgagggaggtatttttctaggaagagaaagtgactaacagaaatcaagacaaagggggacaatcagatttttcagatgacagaaagcaggtaaactctagagatctagagaactagcaaatggtctcttcagggtgtcatcattgcagtaaatgagctctagctatttctgtctttattcttcagggtattcaagattgcagttacttaggagagacagagcatctgactgattgaacttgggttctgtattcactcctgggccagggggaggcagggtacctggtctgacagtccttccaaggctgcatgaaccagaggagctgttaccagaaaagggcagagtgaatttggggcagcaaaaacatttattgcttatcgactatcactgcaaggattactcagagggtgatgcagaatcagcacccctctatttctaagatgaccttgaatgtcagagcaaggcacaaacaggttgcagagacatgtggagtatctggagcactgtctcaggatccttcctctcctgctggatgctaaggaccttaaggacaagagctatctttgcttgcaatttatttggcaggccctgcagggctgtgcaaatgattctatttaatttttactacttgtgagaaggcacagagggctttgagagggcacagagggcctcttataatgggtagatatgcacattagctgatacactggaaactttccagcaggcatatccttccaagatgataaatattcttccttgttggagaaattgaagacatttgtacttgcaatctagcttatctagtaaaacaagacaaactaaccagtgatagggagaaacatgtttgcattattttccaaccttgaaaataatgtcagattattggactgagaaccaatgtcatcttctggatctggtaattatttggacaaaatctctttgattctaggttcaaagtcaaggtgtcaaaaaaaaaaaaaaggatacaactgttaagcttatttaattatacctctcactgtacaaataaggaaactaggccaggcgtggtggctcacttctgtaatcccagcactttgggaggacaaggccagtggatcacctgaggtcaagagttcgagaccagcctggacaacatggcaaaaccctgtctctactaaaaatacaaaaattagctgggtgtggtggcaggcgcctgtaataccagcgacttgggaggctgagacaggagaatagctagaacccgggaggcggaggttgcagtgagccgagatcatgccactgtgctccagcctgggtgacagagtaagactgcgtctcaaaaacaaacaaacaaaaacaaataaggaaactgggctcagagagatgaaggtacacaggtgatgggtagatagggacaaagaaaagaacctaaccctttggactccccaagccattctaatatttgtttttgtaagttagtagcttctgcacgttagtatgtcagaactcaactagtttcctatctttcctgataacctctccgacccacccatgatttagctaacatctgatttggtcaaccaagcaccctggtcctcaggttcagtgtgagacttaatgaaataggcgtgaatttttttttttttttttttttttttagacggagtctcgctctgttgcccagcctcgcaatctcaactcacttcaacctctgcctccggggttcaagcgattctcccacctcagcctcctgagtagctgagatcacaggcgcccgccaccacgcccggctaatttttgtatttttagtagagacggggtttcactatattggccaggccggtctggaactcctgaccttaggtgatccacccaaagtgcttggattacaggcatgagccaccgcgcctggctggcatgaattttttcttctgtccctagttcatcttcaggtcactgtctgattttattagttctcaaatttaaatcactatgcatgctcagctcttctagttatttcccttctttcctcatgttgggaaaaaaaccccgatttattctaattgtgagaaatgaaagcgaacaaatcctatcattccctattgtcttgtgcaaatatgaagagagatatgatagtggggtaaataaaagcatcagggaatccattcggcagaatctttctcctctcagcgtgcttgcagttagatattctgagattccagtggagaaatggtatggtggaaacattgaggttcaacaaggctcaatttagggcatattttattcagattctaccatatatattgtctaaaatgaaacaacactggggaatgaaaaggttggtcgaagatgcaagttgcctttattaaataaagacaaatatttaataaaaataatgtataaaaataatcacaattcactttcaaatctgaaaatactgagttttccaggctacacataaataaaactgccaacgatgacaattccagcaactaggaaaacaagtacgcctacaaagaaaagtgagaaaattcatggagaatttgaactcagaaccaactcctcggagctgatcttttttgggggaagccagggaacgcgccgggcgctctcatcagcaagaccatgtttaaagagagtgtggaagcacagaccaaaatggacattcgagggcgaacagcagctggcaaagggataagtgatccgaagcattaaagcccttgagacaaattccggcgcgaaccgccagtgggggatgagactcgcaggcgcagccctccaggccccggcggactgacacgcacgttggaaacggagtcacccaccacagccccgcagctccagccaaaatggcgccgccgctctgcccaccccgcgcaccccaggcggccgccgagcccgcgcgcgcgccctgtggagcgaggacgccggggacgcggccagggacgcgcgcgtcctcacggcggttgcacgcctgcgcgagggcgggcggcgggggcgcgcgcgcggcgggggcgggctttgccgagcgcagagctgcagccgccgagccggacgtgtccgcgaagatggcgggccgggtgagtgccggtctgggagcccaggcttgaggcaggggcgccgggctcgcgggcactctggggtccaggcggccccagaggagtgggagtgaatccgagcaatggggcgcgaggccagagcgggacttgagggtagcaggggagcggtggcaggggattagccctcctcaacaactccacccccctcgaggggagatgacccctcgttacacgcgtctgctgcgcctcccgtcatcctcccttcccatcccttggggcttgttccctcgtcctccacacagccgcagggtcgcggtcgccgaagccccctctgacgggctctgggggtctttccgcacccccttgcgagggcttattagggggcgccggagtaactgccgggagcacctctgctgcattcggggcaaggggtgtaggaaggatcttcaggaacccatgtctggctcttcacaaattaaaggtcgttgggaaagaggagggggtgccaatgacttttagtgttaaagcccggccatctgggggacctgtcaactgtcgggtcaggcaggaattggctttagcttggagtgaggatggatttggggtgtcacgttttgtttttatggatgacactcgcttcgaatgcagcaggatatgctgtagtttcagggttttaaatttacttcctcctttagcctttaggatcgttgggtaggatgggtttggcgaggagagagagctggttgagtgctgtattgcagtctgccttgagctaaaagctctcaagggatgagtcctgcccggagattacactggtcataaacctgaggacattaactgcgtcattgggggtgaaagatgtgattgactgatctatttataacagaatttttgaataagtttgcatagatttatgcatatatgcaaatgccctatctgaagggacttgtaggtcatgagattctagagtaagaagggatcttaaaggtcatttagtttggcttctttctcttccttttccccatggcctctccttttaaggctagtccttctgccagtacttcagaccctatctgtatattcacctgctccttcttaacataatcaagcttctctatcttaaacccttcccccacccccacagctgtcaccttttcccgtcccagtttacagcaggaaatttgatagagttgtctatatttattgtcttccatttgcttaccacctactcacccttcaacctactgcagtctgatttctgccccatcatcccactgaaacctgtccctcaacttaattgatacctttcaatccttatcttatttgatatctcagcagcgtttgacgttgttgaccatggcttccttgacggaaagcactcttcacatgtgttctggaatgcctcgctcctggtttgactcagacctctcttttgcggcctcaccctcctctactttgttattcattgctggtattcctcaaaggccgtcttctcactctcaatttcccgctcaggcaatttcttctaagcccatagctacaactgtctatatgccagtgattctcaatattttacccccagtccagacctgccctttaagtttcaggttaatatgtccaactgcttatttaaaatcaaggtcccgaaacgcagctttttcaactccgaacccaggatcttagcccacctaacttgtgtagatactcctcgacttaacgatggggctaccttccgataaacccattgtaagctgaaagtatcagaagttgaaaatgcatttaatacacccgatctaccgaatatcatagcttagcctagcctgccttccttacacatgcacagaacacttacattagcctacagttgggcaaaatcatctaacataaacctatattataaaatgttgaatacctcatgtcatttattactgtgctgatagtgaaaaacagaatggttgtgtaggtcttcaaagtacagtttctgctgaatgcctatcacctttgcactattgtaaagttgaaaaatgttaagtcaaaccattgtaagtcagggaccatctgtacctatccagtgagataggaatatctcactgaatgataccatcatccacccagttatataggctgggaatctgagggagggagagggtgggtaaccctttatgtctctcttttgctgtacccatgtcctctgccctatcccccggtaaaatttgtcagagttctgctcctgccccccataaaggtatttaattagggccaaagactctggtttgggggaatggttgctttagactagttccaagtcacccactggactatctggattggtcacatgggttctgtcattttaacctaaaaatctccagtctgtccacctttccacatcttcatttttacctccttttcccaaactaccatcatttctggtctggactactgcaggaagcttccaagtatttttttgttcgtttgtttgagatggagtttcgctcttgttacccaggctagagtgcaatggcgtgatccctgctcactgcaacttccgcctcctgggttcaagccattttcctgcctcagcctcctgagtaactgggattacaggcgcccaccaccacacccggctaatttttgtatttctagtagagacggggttttaccatgttggccaggctggtctcgaactcctgacctcaggtcatccacctgccttggcctcccaaagtgctgagattcgtgcccggcctcccaagtagtcttcttagagcatgtggcccacctccaattcattcttgaccttcattgttccttcccgtgcctattactacttaaacccctcctcagcagcatcccattacttttgggagaaaaccaaatccttaatgaggccttcaggactctttgtggttctgctcctgcttctttccactcattctcttactctgtgtgctcaggttatatggtaaacgagcctttcaattccttgaacctgtagtttctcttaccacaaggtctttgcgagtggtgtttcctttctttgtaacgttcttccccccaaccatttacctcctactcagacatcacttagctactcaagggaggcctactctgaccccacattataagtcaggatcctttgttatatactcttgaagaactgtattcctctccttagagatttatctttttgttactttgagtgtgtgttattatttgcttctaccacttcacctcagtgaaaagcagagaacatacaagttatttagtcattatcaactgcgctttgtgtaccttgtgggacttaggtactcaatacatttttgttgaaaatgaatcagtctctgaacactctggtgatagatggtatattaccctaaagcttgcctgtaatgtcatacagctatgttaggtctttgttatctggagttccatgtaacttttatacgtagttactatttctgctgtttcaagccatacggaactaaacacaattctttttccatgtaatagctactcaagctactcatttacttgaatacaggttacatatctcctcagattttcgattttgcaagttaaacatcccccaattcctagcatatttcatattccaaacccttcatcatttaggctaccttcctctggaagtaacctaatgttactgttttgtcaacctttcttctaaaatgtgcccagagtggaacacagtgatcagagaagaatgtacttaagctattattgtcttgagatggacactaccattattcataccagataaaattgtattagcgttttttctatagtaaatcacattcttggctcatactgagcttgtagtcagtgaaaactcatgttcttttaaaatcagctccctagctccattctaggtttagagcagttttattgaacctaaatcaagaccttatccttttacaattcatttttttaggtcagtgcatgtctgctgtttgttgaggtaatctggattcttagttctttcatgttaggaaacataatagctgtctcttccagtttggttagatctgtaggtttaatcatgacttctgtttctacgtttgagttattggtaaaggatagaataagacagggtcagaaataacccttggacatgctgccagtgacatgcctctagactgatacccattaatacacttgggcactgttgcttaaatacagatgtgtctcatttaattccaacaaaacaacctgcaaagtaggtagtattatctttgtttttttgcagagagaaagagagagagatttagtaacttgagaagttcacatagccagcaagaagcagggtcaagatttgaactcagatcagcctggtactgttacctagttcaccagcttagttgcaagagtgtagtaaagactaggtttacctcacctagaactttttggacataataatgttcagaaactatcttctaccttttggaaaatctgaaaaactttggcccatctgattgtctatcatttcttctgatagcctttattttctagtaactactgagtgatttttagcaaaaatagttcaccttgttgcaatacttttatttgtgcatatttatggagtacatgaaaatttttttacatgtgtataatgtgtagtgatcaagtcagggtacatgagtccaatgtattaagtatagtcatctactcagctatcaaacattgaatttattcctcctatcactggatcttttttttttttttttgagacggagtcttgctccgtcacccaggctggagtgcagtggtgttatcttggcctcactgcaacctctgcctcccgggttcaagcgattctcccgcctcagcctcctgagtagctaggattacaggcatgtgccaccacgcccagctaatttttgtatttttagtagagacagggttttaccacattggtcaggatggtcttggactcctgacctggtgatccacccgccttggcctcccaaagtgctgagattacaagtatgagccaccgcgactgacctcattggatctttttaccttttaacccacttctcttcagcctttctctcccttactccgccttcccagtctctgttatctatttttccactccctgcctccttgtgttcaaattttgtagctcctacatatatgtgaaagcatgcaatatttgtctttttgtgcctggcttatttcacttaagagaataacctccagttccatccacattgctgcaaatgatatgatttcattctttttatggctgaatagtattccattgtgtacatgtatgacatcttctttatccattcatctgtagatggacacttaggtggttgattccatatttttgctattgtgatagtactgcaataaacatgcaagtgcagctatccctttgatacattgatttcttttcctttgtgtagatacccagtagtgggattgctggatggaaggtaattctatttttagctttgagaaatctccatacagtgttccttagtggttgtactagtttacattcccaccgacagtgtatgtgagagttcccttttctctgcatccttactaacatctgttactttttgtctttttaataatagccattctgactggggtaagatgatatctcattgtggttttgatgtgcatttctctgatagtggtgtggaacatttttccatgtcttcttttggccattgtatgtcttcttttttaatgggattatttgttattttccttttgagttgttcgagttccttgtatgttctggatatcagtcctctgcttgatgaatactttgcaaatattttctcccattcaacaggttgtctcttcattctgttgattattcttttgctgtgcagaagctttttagtttgcttaagtcccatttgtttagttttctttatgttacctgggcttttgatgtcttaatcataaattctttgcttacaccaatgtccaggagtgttttccctagactttcttgtagtatttttatagttttgggtcttaaaatcttcaatccattttgagttgatttttgtatatggtgagagataggggtctagtttcacacttctgcatgaagttatgcaattttcccagcatcatttattgaagacagtgtcctttccttagtgtgagttcttgtcagtgttgttgaagatcatttgtctataattatgtggttttatttctggattctctattctgttccattggtctacatgtctatttttataccaataccatgctgttttggttactatagctttataatatattttgaagtcagataatgtgatgtctgcagctttgttctttttgcccaggtttggtttggttgtttgggcttttttctttttccttttttggtcccatatgaatcacattggtattttgatagggatttcattgaatctgtagattgctttggcaatatggtcattttagtgatattaattctttccacaagcataggatgttttttgatttattttctttcattggtgttttgtagttttctttgtagagatctttcacctccttagttaaatgtattcctaggtttttgtttgttttcggtagctattgtaaatgggattgccttcttaatttctttcttggctagatccttattgatgtatagaaatgctactgatttaaaggttttctaaacctacagatatataatcagcaaagagacaatttgactttctcttgtccagtttggatgcctttcatttctttctcttgtctgattgttctggctaggatttccagtactgtggtgaataggagtggtgaaaatgggcatccctgcctcattccagcttttagaagaaagatctcacctctcctcattcagtatgatgttagctctgggtttgttgtgtatagactttattattttgagatatattccttctatgcctaatttgttgagagtttttttaatcatgaagggatgttgaattttatcaaatgtttttgttgttgttgcaatactcttttttttttttttttttttttttttttgagacagagtcttgttctgttgcccaggctgtagtgcagtggcgcgatcttggctcactgcaacctccactcactgggttcaagcaattctcctgcctcagcatccctagtagctgggattacaggcctgtgctaccacacccagctaatttttctatttttagtagagacagggttttgctatgttggccaggctggtctcgaactcctgacctcaagtgatttgcctgccttggcctaccaaagtgctgggattacaggcgtgaggcactgagcccggctgttgcgatactcttaatgggttttatatttcctttttgtgggggacagtttattttgcattcttactacttttgatattctgacatcatcttataagtgggatttatattcactatgtaattgaagttttttccaatgaagcaccgtatatagtttatctgggaaattggctgaagaataaaatgtgtgatgttattcagtgtacagtttctaggtcatcagaagataccactaccttcccactactggaaaagaaaaaagaaaagttttccacagtgcctgaactgttttgtatgcttatcttttaaaattgccagaaatctcacttactggagattcagcagtccctttctgaaaatacacatactttagtgcaaataaagccagtggatctctttcttcataagtccttaaacctagtcgaggtcatctgtttggcagagataggagtaagataatgtgaaataggaaccaacgagagagaacttgcttaggagttgaaaggggtatggaaagatgttagaggtaaaatttgtcgaatctagtgttttgactagggcaggccagaatattcagtatcagtatcaatatcagaagcttttgtagcctttgtttagaaacctagtcatttataacattttgtgggtgaatgacatcattaccaaacaaactttcagatgaaactttggaactcaagctgtaaattgtggatagctcatgtgcagtactacaaatcaaaacaaatactataaagtgtttggtagtccatttcctgaatgaaagtttgtccaaagtatatcaactttctgcagtcttacatgcagtagttattagttttgtgtatcgctttagtggatatttttaaaagtatcttcaaatgcaatgaattttaggaaacaaaacaattctttaaagcatcattagatagcttcttctttctgaaacccagaggaatttatgtataggatgactctttttttcaagtagttaagttaaggtgcaaaagtataaggtaaagtatattatcttaccattgaaaattttggcagtggcagaagagcgaacccttacaaataccttcattgggcaatacactaagcacttgctgtaatgctttttaaaacatctatactctggctgtggtattttaagtgaaaatctctcagtgagatactctttcgtattttagtactgatatccttaatattgctctgagagctaccttatactgacttcagtttcctagtgatttaaactactaatttccaacttatttttttttatagtgaaaactaaatattccttttgtagatgtaaccatttctggaagccctaagtatttttgaatgagtataattcatgcacactttaagagatttcaagcatgacaagcacagtgaataacatatatccatgtgattaccactgaggtttaagaaatgttaacatatgatatctgcttcagatatttatctttttaaaaatagaacattacagctgggcatggtggctcacacttgtaatcccagcactttgggaggctgaggctggtggatcacctgaggtcgggagttcgagaccagcctggctgacatggagaaaccccgtctctactaaaaatacaaaattagccgggcatggtggcacatgcctgtaatcccagctactcgagaggctgaggcaggagaatcgcttgaacctgggaggcagaggttgcggtgagcgagatcacaactccagcctgggccacaagagtgaaactcagtctcaaaaataataataataaataaaaaatagaacattacagatccaattgactcttctttgtattgctcctttttttttttttttttagttttatttaaaaattttttttagaggctgagtctcacttggtggcctgggctggagtgcagtggcgcagtcatagctcactgcagcttcacactcctgagctcgagcaatcttcctgcttcagcttcctgagtagcttggactagcagaggtgtgccaccacatctggctaattaaaaaaaagtttttagagataggatctctctgtgttgctcaggttagtctcaacacctggcctcaagtgatcctcccacctcagcctcctgagtagctgtggttgtaggtggcagccaccacacctggcagtatcccttcttgagaccactgacctttcccagaagtaatcactgtcctgaagttggtatagattctttctgtctacatctatgcatgtttatgctcaaaaacaatatattgctttgtgtgtctttaaaatgtatataatggttttatgctatatctttctttctgcaacctgcatttttcacttaaaataattttgaaatttagtcctgtggatatatagtgagccaattaattctgcttagctactctgtagtctgttttgtgaatataccacaatcatctactttcttattagaggacaatttaggcagttccaattttatttttcccggaatgtacattattttagtcgagtgccattgccacattagcgatattttggttagtgagggactgcagataggaaggtgatcccaaaagattataatgccatatatttactctacctttctatatttacatatgtttagttacacaattacccattatgttacagttgcttacagcatttggtgctgtaacatgctgtacaggtttgtagcctaggagcaataggctataccatataggtttgtgtaagtacgctctatgatattcatataacgatgaaatcacctagtgacacatttctcagaatgtatccctattgttaagcaacacatgagtgtgtgtctccatgcatatatgtgtaagagttagcatgtgtgtccagaggtagaattgctgggcgataagtcatactcatctttacctagttatgccagtttatactgtcactagcagtatatgagtacctgttatttatatcctctccaacacttaatattgctgacattttaacttttacaatataataggtgtaaaactattgtttaaatttgcatgttgtcctcattactagtgagattaagcatttttcatattggtcattgggatttccccttctgtgaattacttttgtatatttgctcattttttctgttgggctgtgtatttttttagtgatttgtataatttttcgttttttggggggtagggtatgctttggattctaatcctttgttgtaaatagcttctctcagacagtgatggtcttttcatgatgtttatagagtgttggatttaaattttatagttataattaccctttttttttttttaccttggtgatttgtgcttttatgtgtttttcaggaaatctttctccaccctgaagtcattttcttataaaagttttaaaattttgccttgcacattttggtgattgatcaggaatttatttttgtgtttggtgtgaattatgaactaattttatcttttccatatgtataaccagttgtctcaatatcatttattgagtccatttttttcctttactgatttgcaatgctatctctgtattatatccagttcccatatatgtgtgggtctaagtgtcgactctattccgtttcataattctttttgtccatatttgcatcaataacactgttttaattgctgtagctttaaaattattcttgttatttcatagggcgtactttcattacctttcttaatttggcatttcttggctcttttccgtatgaattctgggaacaacttaatccccactcctttaaaaaaaaaaaaaaagacactttggcctggcatggtggctcacacctgtaatcctagcactttgggaggctgaggcgggtggatcacttgaagccaggagttcaaggccagcctggacaacatggcaaaaccctgtctctaccaaaaattagcgggcatggtggcacacgcctgtaattccagctacttgggaggctgaggcatgagaatcagcttgaacccaagaggtggaggttgcagtgagttgagatcgtgccactgcactccagcctgggcaacagaacgagacagttttttgtttgtttgttttaaagacacttttaaccttccgctatggatttttgacctacatttttcctcttgtattttataagagtagacacagagagcacttcaataaaattcagctcaataactttattaacctgatctccttttctttgactttaagctgaaagtgttaatttctcacaacttgtgctctatagatttgaaaccaaatcaattagcatcagctgtttatgagtaatgcagggtattttggtcttttgctaaattcagaaagaaatgttaaagtgctgatggatttgcactagctgtatagatctttggtggaggaggaaatgggaaaattattaatttcaggtaagaagtcatttttgaaatgcaagattcatttctttttaaaatcaccacataataaaaactttaagggctgcattggtgggtttttaaaaaaaattgtgaagtgtttttagtgttatgtgctgacaaatatttttgtagttgctttgacaagcaatgaaactaccaattatcactaattctgagtcttccaatgaacctctgtgtcaaatttttaaatttaattatcctgactatttttctcctagagaataatattgatataattttgtgaaccatagcagacagttcccattgctgagaatagagcctggtgtggggatattatgattcttgaatggttgaacaagacatttgcttctgaacatcttagtaaattatcacttctgacaatgtctgtagtttgaattttgatattctctgccaaggtattgaatactctaaataatgttgtttattctattatttaaatcattagtattatagatctagctttaaacagctgctgcactccagtcctttttcttcacctgcagatattgagtctgataactgttttgtatacatagcctttcagtaaatctacttatcagtcatcaaattaacttaattataagttaaatgatgagatggaccaagagtgttattgaaatctcatttccacacatttcttctcttcttttgtagaaggtaatgaaatgaacctgtcagtgttcctgtttttatgaagtttatttctcttagtacagtgattctgatagtgggttctgcagaccagcaaattagcattatctgagaacttgttagaaaagcaaattctcagttcccacttcaggctgactaatttagaaaccctggggtagggcttagcattctctttcaataaattctccaggtgattctgatgtatgttaaagttgagaagcattcacttagtgttttgagctctccaatttagttccttataaattgttgaagatattttttccagatttctttccaaatatgtgctcaaccttgttactgataggtttcaaggttatcgtcttcttcccattaataccttcatctatatccaattttcaaacttttaagaaagcatggctattttgctgcagtatggtgaattaggtactctgactgaccttcccagataaacaatttaaaattctagataatttttttttggagggaggacagggtcttgctctgtcacacaggccggagtgcagtagtgtgaacatggctgactgcagcctcgacctgttgggctcaagcgatcctcccacctcaacctcccgagtagctggggccacaggtgcacaccaccatgtccagcaaatttttttattttttgtgcagatggggtcttgccttgttgcacagactggtctcgaactcctgggctcaagcagtttttccacctgggcctctcgaagtgctgggattacaggtgtgagtgactgtgcctggcagatgaaatattttttaagtaaaaaccttatgtgcatggagatagctggctgaaaagtaaggaataatcaggccaaaaactatgtgaaggtgaaaacccagagatataagccaagtactgctgccttgaggacattatttgcaaatgacattacttggaaaacctagttaacttgtgcttgtgcctcaagaagctcagagaacggaagataaaagtagttttctggtagaacgtcccacctctcctggtaaagatggtaccccaagggtctatacatcataataaatgagaactagtaataaacgtaccttgtctaaggatcggaaagaaaaatttcctgcctcaaactttggtggtgatgggaagggtacagaaattccctgagaagttttacccacaagctgaccttcatgcaggtttgaatcctgattttatattacctggatggtatgaaaatcttaagccagtaattaaatataaaagtggtacaagagtgacgatgccttaaaatgcctaagaatgcctaaaaagcagcaaatacaaagcttcttgggagaacccatcttgatcttaggatttagaaaattcctaaacataaagctgtaagaaatatgaactcacattcacaaaatgcagaaagaaataagatgcaatgaatgagaggaagcagaaacaataaagagcagaatcagaacctgcaaagagttcacatattggagttagcagacacagattataagtacatatatttaatatgcttatagaaaaaaagaaatttaaaataggaatgaggagcaagtatacaaaaatgaccagtgtacaaatttaataacagattagacacagctaaagaaagatttagtaaagtggatctgaaaaaattgcagtatagaggcaagaaaatgaaaagtaataaaagagttaagagaatacagagggtagaataagaaggttcagtctagtcagaattctggggcaggggagcaggggcatggaaaagaatgaggcagaggcagtatttgaagagataatgacagagaactgatgaaaaacaacctacaaatttaggaagctaaagaatcccagaaaggataaaaagaaaaaaaattcacacataaacattttttaaagaaactacatgataccatagagaggtcttaaaagctgtcagaggctgggcatggtggctcacgcctgtaatcccagcactttgggagcccgaggagggtggatcacctgaggtcaggagttcaagaccagcctcaacgtggagaaaccctgtctctactgaaaatacaaaattagccgggcgtggtggtgcatgcctgtaatcccagctactcaggaggctgaggcaggagaattgcttgaacctgggaggtggaggttgcagtgagccgagatcgtgccattgcatgccagcctgggcaacaagagcaaaactccatctcaaaaaaaaaaaaaaagctgtcagagaaaaaagatattaccttcaacaagtatttggctgtcagctgttttcctgtctataataatgaaagccataagacagggagtaatattttccatatgcttagagaaaataattgtcaaccaagaattgtatatcttgtgaagaatgggggcaaaattagacactttaaaacagacaaacactcaatgttgtaaccatcaaaccttccctactagtggaaattcagatcaatttcctgaaggctaaaaaaaaaaaaaaaaagtgaccactgatgtaaagtctgagatttaagaaggattgaagagtaaagaataatggtaaatctgtggatatattgaaataaatattggctttataaaatgatgtatgcggaggttttaaaaatagaactaaataggccaggtgtggtggctcacgcctgtaatcccagcactttgggaggctgaggtgggcggatcacctgaggttatgagttggagatcagcctgaccaacatggagaaacctcgtctctactaaaaatacaaaaaaaaaaaaaaaaaaaaaaaaaaaaaaaaaattagccgggtgtggtggcgcatgcctgtaatcccagctactcaggaggctgaggtaggagaattgcttgaacctgggaggcagaggttgcagtgagccgaaatcacgccattgcactccagcctgggcaacaagagcaaaactccgtctcaaaaaaaaaaaaaagaactaaatatatgataacaacatccaaatcaaaagagtggttaaagtattttatgatctttatactgttgaagagaaaggtaaagctattcaattaactttagattttgataggtatgtgtattagtattttcagagtaactactaaaataatataaatattaggaataatttatagcagaaaaaacaatttttaaaaggcaaggaagaagtgaaaaacatagaaaaggtcagataaagaggaaacaataaaatatagaaatcaaatcaaatatatggtagactaaatgcttcattcagacaaagaatgtcagattggattatttaaaagcaagcaggccgggtgcagtggctcacgcctgtaatccgagcactttgagaggctgagacgggtggatcacttgagatcaggagttcgagaccaccctggccaacacggccagctggccatggccagctaatacaaaaattagctgggtgtggtggtgcacacctgtaatcccaggtacttgggaaggtgaggcaggagaatcacttgaacccaggaggcggagattgccgtaagccaagatcatgccaccgtactccagcctgggcaacagggtgagactctgtttcaaaaataaataaataaataaataaataaaagcaagcaaacaaacttactgaaacaacacaaaatccagctataattttcaagagagatagctaatacatatgaatgtagaaagatagaaagcaaaaggatggaaaaagtctatcaggcaaactctaaccaaaagggaggtaaactaactatattagcatcagacaatatgatctttcagacaaaagagacagctagagataggtccctcaacaatgagaaaaggtttatttatccataaaggtaaaaacaattccaaacttgtgtgaacctaataattgcctcaatatacaaagaacaaaatgacacaattataagatgaaatagacaaatctaccatggtgaggagtttcaaaactccctaattgaaaaattaaaaagacaaaatggttacagctgaaaattaaaattaaaaattcattttctcggttgcaatagccatttttcaagggcttactagtgacatgtgacaatggctgctgtattggacagcacagaaagtacttttgcactgcattaatttagaagacttaatataattaacaatattaataattgagtattgaacaccacatccaaggtgcagatctctgaataatatctgatcataatgtgggcaagttagaaattaatgacaagaaaaggcagaaacatgggagacaggtgaagatttcttaaacagaatataaaaagcactagatacaaaggaaaaaagtgattaattggatttcatcaaaagacactgacttagtttgcttaggctgccataacacaatactatagacttggtggcttaaacaaaataaatgtattttctcacggttctggaagctggaagtttgggaccggggtgccagtatgactgcgttttggtgagcactgtcttcgtgacttgcacacaggcttcttgccacgtgtctgtgtggcggagagacagcaagatctcaccatctctcttccttttcttataaggccacagtcttgtcagattagggcccttcgcttatgacctaatttagcctcaattatctcccaaagtccctatctccaaaatagttggggtgggggaagtgccttgactaatgaattttgttgggggcagtggggagtgcacatttcactccatagtagacaccattgaggagaaagaccagagtggaagaaggtatttgaaatacatgtatttgacagccaggcacggtggcccacacctgtaatcccagcactttgggaggccgagctgggcggatcacgaggtcaggagatcgagaccatcctggctaacacagtgaaaccccgtctctactaaaaatacaaaaaattagccaggcgtggtggcgggtgcctgtagtcctagctacttgggaggctgaggcaggagaatggtgtgaacccaggaggcggagcttgcagtgagccgagattgcgtcactgcactccagcctgggcgacagagcaagactctgtctcaaaaaaagaaaagaaaaaaagaaatacatgtatttgacaaggacttgtacctggaatatataaagaactacaaatcaagaataaaaagaaaggacagaaagccaatggaaaaatgaacaaaggattcaaacagggatttcacaaagaacttacctgtaacgtatgttaaatgctcaacctcattagtcatcagagaaatacaagttaaaacctcagggagatattactacacacccaccagaaagttaaattaagaacacatttgtcatgacaattctgggtttgattttgttttgttttttgagatggagtcttgctcttgtcgcccaggctggagtgcagtggcataatcccagcttgttgcaacctctgcctcctgggttcaagtgattctcctgcctcatcctcccgagtagctgggattatgggcacccaccaccacgcctggctaatttttgtattttagtagagatggggttttgccatgttggccaggctagtcttgaactcctgatctcaagcgatccacctgccttggcctcccaaagtgctgggattacaggcatgagcccgcgcacctggcctgtcatgacaattctaagtggtgatgaggatgtgcagcagctggaactgatgaaaatgcatgagcacaacctctttggaaaactagcagaattccctaaaactgaatgtaggcatgatgcccatgacccagcacttatagtcctgggggtgggaggagtgaatatatttctattcatgatttctatctctgatgacagaaattaagctagtgggtatctgtggttgagtagaaggatagtgactaggagcgggcagtatgggatgctggtaatgtcctcttgacctaactgttggttaccctgggtgtgttcacttgtagaaattcattgagccaaacacgtacaatgtatgcatttttgtgtatatatgttcttcttcaataaaaacttgatttaaataatgttctttttcttaaactgggtagtaggtttatggtgttttatgtgttgcctgtgttttatacatattttattcctgttcagtgtccaaaaaatataaaaagtagtcactgctttgttgttaatttgagcatctcctgcacctagcacagtgcctgggacattatagatatttattaaatatttgttctatggaaaagaagtaggctagtaatttctttttgctttccaacagccagtttttgattcaattatttgtaaatatgatttctactcagttgtttctaaataataaaatatgtaaatactattatgtttatatttattagtaagctgaatttattaaatgagaaacctctcaatattaaggacacatcataaattattagcatgctgtgttataatgactaaaagtagtatcaacaatttagataagtatagtgtggccttacggatgtaagtccgtaagatcatgcagcattgaagatgtgcagtttactagatcttctaatattctcgggtgtctcactgtttcttttttttttttttttgagatagggtatcactttgtcacccagtctggaatgcagtggcgtgatcagggctccctgtagccttgacctcctgggctcaaacctctcacctcagccccctgaataacggggattactgatttgtgccaccaagccaggctaatttattttctttctttctctctttctttctttctttctttctctctctctctctctttctttctttctttctttctttcctttctttccttctttctttcttttctctctttctctctctctctctctctctctctcttcctttcttcctttctttttgtagagtttgggtctcactatattgcccaggctggtcttgaactcctggcctcaaatgattctccctccttggcctcccaaagtgttgagattatagttttcagccaccgcacccagcctcactgttttcttcagttgtttctgaacaactggaatctcagctgtctttttccattaaatcccgtgttcgttcctccataccatgctgcctcttgcccatttttgcatttctcctttctgctttcctgaacatcctgagtcttactgggctggcattcccttgttgggacaggggagaggctctaggccttggatccttgttctgattccttctccaaagagttttccctttttcttcccctttcaaaacaacataagtgcaaaagctttgtcaggatgttgggaattaaaaaagcttcagaaacattttgattcatttaacaacattactctgaaactttttagagtaagagtaccaagtcactgaataagacgatcttgaaattaaacgatattttacagttttaaaaacaccttcacagatcttttcttattagattctcagcacaaccttatgagttggcactgtcaaaattcagttcaacaaacaaaatccaactaacaggaaaactcacagctaacatcatacttaatggttgaagactgaaagctttcccccttaagatcagaacaagacaaggatgctcttgccactcctattcaacactctattggtggttctaggtggggcagttaagcaggaaaaagaaaagacatttatatcagaaagaaataaaactatatttaccgatgacatgatcttacatgtagaaaaatcctacagaatttaccaaaaaaaattggaactaataaatgagttcagcaaagttgcaggatacaagattattatctaaaaatcagttgcattcctatatgctagctatggataatctgaaaatgaaatagaaaaaattccatttataataacatcagaaagaataaaatacttatgaataaagttaaccaaagaagtacactaaaaagtacactaaaaaacagaaaacatgttgaaggaaattagagatctaaataaattgaaagacgtcctgtgttcatggcttggaagacttaatattgttaagatgacagtgctacccagatttatctacaggtttaatgcaatcactatcacagttcaactgcctttttcccggaaatggacaacctgatcttataattcatatggaattgcagagccatatttgccacaacagtcttgaaaaaaagagaacaaaattgtaggactcatacttcctgatttcaaaacttattacaaaactacagtaatccagatggcatgtcactggcatgaggagagtcttgtaaaccaatggaatgcaatttagagtccagaaataaacccatacatttatggtcagttgattttgaccagggcgccaagatcattaactggggaaagaataatcttttcaacaaatgttgctggggcaactggatatctacatgtaaaaaaataaatttggatccctgcctcacatcacatatgaaaattaactcagaatggatcaaagacctaaacctgttaagttcttcgaaggaaacataggtgaaaatctgtatgaccttggattaaatggtgatttttaaagatataacacaaaaacacaagcagtgaaagaaaaaggtagataaactggactttgttaaagttaaaaactttcatgcatcaaaggacactgtagaatgaagacaactcacagaatgggggaaaatatttgcaaattatatctctgataagtatatatattttatatatatgttgtttatatccagaatatgcaaagaaccctttcaactcaacaaagataagacaatggaatttaaaaatgggcaaagcatttgaatagaatagacatttctccaaagaagatgtacaaatgacctataagcacatgacaagatcttcaacatcatagtccatagggaattacaaatcaaaaccacaatgagagataacactttacaccctctaggatggtcatactttttttttttttttttttaaagacagtaacaagttttgataaggaagtagagaaattggagccctcattgctgatgggaatgtaaaatgatgcagctactgcacaaaagttttgcagttccttaaaaaactaaacatagaataactcagcaattctactcctgggtatagacccaagataattgaaaacatatgttcatacattaacttgtacatacattaacatgtggcattattcatagttgccaaaaagtggaagcaacccaaatgtccatcagctgatgaaatgataaatacaatgtggtatatccatacaatgaaatcttatccagctgtaaaaaggaatgaagaagccaggtgcagtagctcacaactgtaatcccattgctttaggaggccacgatgggaggattgcttaaggccaggagttcaagattggcctgggcaacatagacccagtctctacaaaataaataaataaaaagaatgaaatactattacgtgccacaacatgaaccttggaaacattatgctaggtgaaaatccagtcaccaagatgacgaattgtatgattctgcttacgtgaaatgtccacaataagcaaattcatagagacagaaagtagattagtggttgagaaggagtgagagaagggatgaattgagattaacggctagtagggacagagtttctttttggggtgatgggactgttctggaattagatagtgattatggttgtacaacatagtaaatatactaaaaaccactcaaaggctgggtgcagtggctcatgcctataaccccaacactttgggagactgaggcgggaagattacttgaggccaagaggtcaagaccagcctgggcaacacagcaagaccttgtttctacaaaaaaaaaaaaaaattgttttaattacctgggtatggtggtgtgtgcctgtagtcccagctactttggaggctgaggtgggaagatcacttgagcctgtgaatttgaggttacagtgagctgtgattgtgccactgtgatccagcctgagtgatagagcatgaccctgtctctcaaaacaaaaccctccaaaaaacaaaaaccacccaagtatacattttaaatgattaattttatgtgaaatatatcagctgggcgtggtggttcacacctgtaatcccagcattttgggaggcagaggtgggcggatcacgaggtcaggagatggagaccatcctggctaacatggtgaaaccccgtctctactaaaaatacaaaaaattagccaggcatggtggcacatgcctgtagtcccaactactcaggaggctgaggcaggagaattgcttgaacccgggaggcagaggttaaagcaagccgagatcatgccactgcactccagcctgggcgacagaacgagactctgtctttaaaaaaaaaaaaaaaaaaatctcaaaaacggcaatgagaactcaattaatatttatcatactgtatattccctgagtggtgcaggagaatcagagcttagaatcttgtgaggaaggcatggtacttaaataagtctagtgtaaggcagcttgtaataagtagtactaagactgctgaagaagcacaaataaaggagatattctatcttactaggaaccagggagtttcacaaacttggctttgcaaggtgggaaagattttcacaggtggaaggggtttgaaatagggaattcagtcaaaaggaatagtgtgagtgaaggaatggagtttggaatgtggggtacatggggttggggtggggtattgaggtagatgacgcagaaaaataagttaaagatagatcttgcataggtggctgtgagtagcatgctaaggagtttgggctttattacttatgaatcatatttttggtttcaggtcatgtctggtggcagagggaaggctgaattggaggagaacaaaagctagaaccagggacaacaattattaccattgtagttttttaggagaggtgatatggctgaactaggttatggttgtgaggctggaagggaggcacatccaagtgacagtgcagtagacttagtagactcttgattgtttatgtgtgcattccagggataggcagtgaagggaagaatgaccctgaaatcttgaatttaatgacttgaaaggataatgatggtattaacagatgaggaacatagcaagacaaacaaatgaaaaagtgaatactgaggagaaggaggtaccactgaatttggcatttagtcattggtgattttgaagacagcagttacagtaaagtggctgctggaaaggatttcaaagaatggttgaagaagatagccataggatgagaacatggaaggcaaggaagggagacttgagagatttggtaataaagagaagagagaaaagggtgctagtttgaaatgagttaaaagaactacagagtagaattaaaataaagtagaattatgggatttttgctttttaagtgacccatgagaggcttactggcagtgtgccaagattcaagagagcaaagattggcagggtgggattaagtgatgggatagccgggtgcagtggctcatgcctgtaatcccagcactttgggaggctgaggtgggtggatcacttgaggtcaggaattcgagatcagcctggccaacatggtgaaacctgtctctacaaaaaatacaaaaattagccgggtgtggtggtggttgcctgtaatcccagctatttgggaggctgaggcaggagaattgtttgaacctgggaggtggaggttgcagtgagccaagatcgagccactgcactaactccagcatgggtgacagagtgagactccatctcaaaaaagagaaaacaaaaaacaaaaaaaaacgacggtagggagccttctgcctctttaaacatttgagatgcatgtcctgagatgcttctgtgaagttaagaatattaattttttgatacgaatctgacaaaactagacatcaaaatatgccatatatggtaattaaaacaatgtggtattagtatagaaagcagacaaatagttaatgaagtagaacaaccaacccagaaatagaaccagatacacctgaaaacttcatatatgaggtttaaaatcagtgtggaaagctggaaatcacccatagtttcgttatccagtcagttgtttttcacattttggtgtgtttccatttagttggtttgccatacttttttaaaaataatgctttaaggctgagcgtggtggctcacacttgtagtctgaagcaggcagatcacttgaggtcaggagttcgagaccagcctggccaatctgatgaaaccccatctctacaaaaaatacaaaaattagcctggtgtggtggtgcttgcctgtagcctcagctacttgggagactgaggtgggaagatggcttgagccagggaagcaaaggttgcagtgtgctgagatggcgccactgcactccagcctgggtgataaagccagaccttgcctcacaaaaaaaaaaaaaatgctgtaaagtaaaagttctgtatacaattctgtgatatgaaccctaccttagtgtgttatgaggattttgatccttatatgatatgatatatataatcaagtgcgggtacgttgtagtttacagaaccattactttgaaacaagacctttaggttactcctaattcatcactgttaaaataatgctgtagggaaaaaattacacataaaagttttctatatttaaagtgatttttgtgagacaaagtttatttattgtaaaaacagttccagcagttcagaattgtaaagagttttacagaattgtaaagagttcagaattgtaaagacattttcttgtctttctccttggtggtaaccactgttaacagtttagtgtgtatcttttttttaagtttagtttttatttttttgtagagacagggtcttgctttgttgcccaggctggggtgcagtggtgtgatcatagctcactgcagcctcatactcctgggctcaagcagtcctcccacctcagcctcccaagtagttgggactaccggcatgtaccaccacgcctggctaatttctgtatcttttgtagagacagggtttcaccatgttgcccaggctggtctggaactcctgggctcaggcgatccccctgcctcggcctcccaaagtgttgggattacaggcatgagccactgcacctggactagtttctttttaatttctgagtagtagtcaattgtatggctctcctataatttcttcattcattcatcttttggtagacattcatgttgtttccatttttaggctattatgagtacagctgttgtgatcatttgtgtgcgagtctttgtgtggatatattttcatttcttttgactaaaaacctaggggtgcacttgttgggtcacattaactttgtagaaactgcattgcatctttgccgatattgaaagttgtcagccttttatatttttctgtgcatgcttttccccccaaaagaccaaaatgggaattgtttttcttttcattataaacttgtaaaggaattttaaagttctaagggatgccaggcaggaggttcatctatgtgaacagttattagtttgagatagataatgtcaaggatatccctaaaggcttttcaagagataactataggacatataagtttaacttatttctaccccatcacttctagtcacatgtgacttcagaattttaacagaaattattattataggaatatgtagcacagagggattccataggcctgaagattagtactgatggcctttcttgcattattctaggctagtgctatccgatgaaactttctgcagtgataaccactagccacaggtggcttttgaaacgtagggctagttcaactgaagaattgaatttaactttaaattaatttgaatagtgaaatatgtctagtgattaccgaacagtgtagttctgaaatgttatttttcaggaaagatcctctagcaagaagtagttgagtgagacctgttagctgagctggccctggggcaggtttgtgttttcagtccttccctttcctgtgggagaaatgaaaccaaagcctagagcaccacagaagaagaaccagtggattcataagggtgacagttcaggtaggggaagctgtttggtaatgagctcttttggtcagatgccacactatttttctttctgtttattttgccctattaaattatttagtaaatagtaaagcgtactttaatccagtttttaaagtggacgtttggatgaaagtatgtgatttaaattccaaaactgtgcagtgttgtccagaagagtcctgattaaatcaccccagtttctttgatgaagataagcaaataattttattttttgctgtaatcccagctactcggaaggctgaggcaggagaatcgcttgtaccagtccggaggctgctgccctctcacagggcttcctcctcttgcacagacgcaccagtgccttcagccccactggtctccctcttctcctttcctggcccctgctggcccagtagatgggccactggaggccactagatgggggctggggaatgtgatgttggcgatctgcggtatcttcagggtgacagccatacccaacgcgtgggacctggcttccacatctatagacctgacctaaggaaatatgtgggcgtgtgcataaggatgccatctcagaactgcatattaataaaaagctgaatcaaacagtgtccaacaagggtggctgttccagctggtcatctacaatctcagctcactgcaacctccgcctcctgggttcaagcaattctgccttagcctcccgagtagctgggactacaggcacacaccgccacacccggctaattttttgtattttagtagagatggggtttcaccatgttgcccatgctggtcttgaactcctgagctcaggcagtcctcccaccttggcctcccaaagtgctgagattataggcgtgagccaccgcacctagcctgtactttcatttcttaataactgcatgactgtagtggttggctttcattattgtttcctaggggcaaggtcaatgttagaaaaattgtggaattttcccttggcattgctgtggtgagtagacagctactatttatagagacttatacttcgttgaaaaaatgagataccatgcctggcttaccataaaaacacagatgtttctggattccagtagggaggccttttgttcacagcatctgttttggttggccagccagatgacttctgtggattttttcactccttttgaaggacacttgacaaataaacaagtttataaatgaaagagttaacagcattttgtaaatttattttattactttagctatatcgttctgtatattttgaactatcagatcattttagctcaattttatcacttcctaaataaccttgagacgatcagtcctttgttacatgttctttggattgtttattctgcagttgagacagatttttattgatctataaatttttgtgttcaacaaacatttaatgagtattcactgtgtactaggccctgtactaacactgggaactacatatgtgagcaagatatagtctcagtctttgagaagtttagtgtcttatatgcagtgcaaacatgtagacagaataaaattatagttgagtccttccatttgaagtttatttcatcagtttagtggggaggggtaggtgtctaggaatgccttccagaaaaagtagtgtctaagtggagaattgtagaatgagtgggagttgtccagggatggaacaggggttagtggcggagattatataaaagaaagaagcttgcaggtgaaaatgaccctgggaaagtgggaaactgaaaaagttcagtacatttctgtcatatggctgatcaagctgtgactgggcaaaatgctgtcagcatttgttgaacacataaatgctgtctcattcacaaaggagacttgtgacctagactttattcatcttgtgctaaattagtgatttccaaacatttgatcatgaatctcataagtaaaaaatgttttgattatgtatcctcatatattgattatatgccaatatttgtttatagatgatatgtagtactaaaagttatatacgcagtagaacatgtatagaaaacaaaaaaaattaaaaggatgagctaaagatggcatgtacaatattctcacagtgttaattttactgaaaatacggaaagtaggctgggtgcagtggctcacgcctgtaatcccagcactttgggaggctgagggaggcagatcacttgaggtcaggagtttgagacaagcctgaccaatatagcgaaatcccatctctactaaaaaatacaaaaattagctgggcatggtggcacacgcccgtaatcccagctactcgggagggtaaggcaggagaattgcttgaacccgggaggcggaggttacaatgagccgagatcatgccactgtactccatcctgggcgacagagcaagactccatctaaaaaaaaaaaaaaaaaaaaaaaaaacccagaaagtaaagtggtacatcattatttaaaatcttcgtttaatattatgtgatacagctgctcagagggctgtttctaaattcagtttattttgatactttaatggcagtcaaagcctggatcaaaatggaagaatttggctgcactttctaaatcatattctttctttctccaaacttattcactatttatggaaatgctttattgaaatgtggctggtaaatatccatctattagtttttcttgcagattaataaaaatatattatacttttattgtgttaataaatgggttccaaaaatcactgttaagtcttcatttggaagatattttaaaaagttttagaatattctgtttctgactttataaagcatgaagatacgagtttttggtgtctttattttttagattttgtatatattgtttcaacagcagaataacttagcaatggaaatgtttccaattatccaattttgaaatgctctattaggaaagatttttttttctctcgctctctttttttttttttttttttttttttaaagatgaagcctctctcttgtccccaaggctggagtacaatggtgccatcttggctcactgtaacctccgcctactgggttcaagcgattctcctgcctcagcctcccgagtagctgggattacaggtgcccgccaccacgcccggctaatttttgtattttaagtagagatggggtttcaccatgttggccaggctagtctcaaactcctgaccttaggtgatccgcctgcctcattctcccagagtgctgggattacaggcgtgagccactgcacccggccgatttttttctctttttcttttttctggaaaagctgaaaataattctgacatgttgctaaacatttttattttgtaggggcagagtgagtttttttgtttttttaatatcttcttggtagcatactacttataacctcctcagaaatatttagcaagtttggaactctagtctttttattttaaaaaaattgtgtaactcatctacatttaacaaatcttttaaatacatttcttgtggtaactagtgaatctgtgtggatttaaaaacaaaaaaaagattatgaggccaaggcaggtggatcacttgaggccaggagtttgagaccagcctggccaacatggtgaaaccccatctctactaaaaatacaaaaattagtcagaagtggtggtacacaactgtagtcccagctactctgagctgagaatgcgccactgcattcaattctgggcgacagagcaagactatctctcaaaaaaaaaaaaaaaaaaaaattcagtggctactctctatctcccagagtataggaagattctatattcatacagttaacctcagtgacatctgaggtaccttgttctgacttaattgcagcaatagtttacctgtgaatgaagccgttaaaggcttttgtatcagatgctatcactgtaactttgttctggaatttttttttttttgagatagggtctcgctctgttgcccagactggagtacagtgacacgatctcagctcactgcaagctccgcctcccgggctcacgcctttctcctgcctcagcctcccaagtagctgggactacaggtgcccgccacaacgcctggctaattttttgttattttttagtagagacggggcttcaccgtgttagccagcatggtctcgatctcctgacctcatgatccacccacctcggcctcccaaagtgctgggattacaggtgtgagccaccgcagctggccagaattcttttttaaaattccagtcaaagcagtcatttcatcagtggttacagttttcccataaagcaccttgtttcatttacagttaagaatacctcccttttaatacattgttccttggtatcttacaaagttgtatttcctgtatatttcataattacccagcaaataccctaagatgaaagaatcatctgtatttttatccaattgtatagcaaaccccacacactgtatttgtcctgatatcttcaagtctttagggttttctaagagcttttgactatacttaccaataaaagaatacatttagtttgtcaccatttttatttctgtgtataatttcagctatggtccttggctttttttagggaaaccttagcagtttcgacactaactttcgtacaattttgtgaagtgtcacattaaatagcctgtgactttagacataggtggaaaaattatagacgtttaactcttgcagtgaacacttaaaagcctggtggattatgaggactttgttcgtgccatcagattatatcttaaggtagagtagacatgtagagtgaggttcatctttaataaaaaatgggctgggtgcagtggctcacacctgtaatctcagcactttgggagaccgaggtgggtggatcacaaggtcaggagatcgagaccagcctggctaacacggtgaaaccctgtctctgatgaaaatacaaaaaaattagccaggcgtggtggtgggtacctgtagtcccagctacttgggaggctgaggcaggagaatggcgtgaacccgggaggcggagcttgcagtaagccgatatcgcaccagggcagtccagcctgggtgacagagtgagactctgtctcaaacaaattaaaataaataaataaatagataaataaatggtgtggctggacgcagtggctcacgcctgtaatcctagcactttgggaggccgaggcgggcggattgcctgagctcaggagttcgagaccagcctgggcaacgtgatgaaacccccgactctaccaaaaattcaaaaattagctggagcatgcctgtaacccagctacttgggatgctgaggcatgagaatcgcttgaaccagggaggcagagattgcagtgagctgagatccaccattgcactccagcctgggcaacagagagagactgtgtcaaaaaacaaaacaacacataaataagaaattgtgtaaagtcaatataaataccagtactaatattttatttttataccccaaaggattatcgtataatacaaacacccttcaagtacacatatcccactttggagactaatgccctaaacaacagggataatgatattgaaactggccttttagttaaaataaaagcaaagccaaaaataattcactttcctctataaatttatatttgggagacacatttaagaataatcgtcctggccaggtgcagtggttcatgcctgtaatcccagcactttgggaggccaaggtgggcggatcgtgaggtcaggagatcaagaccatcctggctaacacggtgaaaccctgactctactaaaaatacaaaaaattagctgggtatggtggcgggcacctgtagtcccagctactcaggaggctgaggcaggagaatgacatgaacccgggaggcggagcttgcagtgagccgagatcacgccactgcactccagcctgggtgacagagtgagactccatctcaaaaaaaaaaaaaaaaaaaaatcagctttggcttgaggtttgaagaatgaacccttcagtcatagactatgactacctgtcatagctcactaggaaaccctagggaatcatggaagggttattggttaaatatattatataaaggaacattttgctagttgctattgaccaaaaaggctgttttttttttttttaaatatagtctgtaattatttttgttgaaagatatttggaagatggtttttctcaatctataggagatacagttcgtagccacctgggatctcttataaaaagatactttttcatagtatactctttataatatgcataacatttcataatatacttttgataatatacataaaatttgatacataagtttaccaaatttattgaatttacttcagtgcatttttattagtcaagattctttggaagatatggaaagctaattcaaaaaagcttgagcaaaaaaaatttgttggctcgtaactaatgttcaggactggtctcaagaacttggttgccagatctgtgtttccaggttatctattagcttgtctgtgtctctgtgatagttttacccttttagagtggaaaatcttcctccttgtggtgctctggcttgcagaagaatgcctttggtctagcgccagcatatataaaatcctgtgggtgggatagagtagatgtggttgcatgtgtgctgactggcagtctcactaaaccacatggaatgggaaaggaacagtttcccaaaggaagggtttgctcttaatgcagaggaagggatgctgggagtcaaaaataatagatgttcattatagcaatgagtgatgaagagaggacagaaaggcataaaatattctttaagggaatagaacatgacttaatttgattttcctaatcattgattcttacagagcatgcaagcggcaagatgtcctacagatgaattatctttaaccaattgtgcagttgtgaatgaaaaggatttccagtctggccagtgagtatctgactttgttttcttttaacctgctaagtggcattcgggaaacttccagagagtcatttttaggaaacgttggaaaatatttttaaaaaattcttgctgagttggaaaatggagaagatgagaaaaagttatgtatttgaatcattactgtgtcaaactttgataaatactgtataatgttttaaaaatgttttatgtataaaactctagttttcatcagttttcttagtagagctaaacatactggttgtatgaatcatatatggcagagttgttaggtgtttggttctggcaaactcagattgtttgagttttcctggctctaccaattacaaactgtgtgaccatttctgtacctctatgtcctgatctgtaaaatggagatgatctcttcctcaaggtagctatgaagattgagttacataaataaagcacttagaacagttcccaacatgttaacaatcccttagtaaatattagctgttatgattattattaccatgataatccaagagacatgaacattggaagatgggctgggtatggaggcttacgcctgtaatcctagtactttgggatgccaaggcaggctgattgcctaagctcaggaatttgggaccaacctggccaacatggtgaaaccccatctctactaaaaataaaaattagccaggcatggtggtgtgcgcctgtagtcccagtttctcaggagactgaggcatgagaatcacttgaacccaggaggcagagactgtagtgagccgagatcgcgccactgcactccatcctgggtgacacagcgagactctgtctcaaaaaaaagtaaaggaaaaagaaaattggaagctgcaaagcaaatgtagaatccttaaaggcattttgcactgtaatttattttaactgattcatatcaccgcactgccaggacttctaaagaccctgctgcaagttcagtgccatccatatgcttctgagattggtacagataaggagatgaaggggctgtagggaaataagaggcaaggtggtagggttttaactgagcatttttcttaaaatgttatctgtgaaatacctgagtttcacagagttagaaatgctaatcatctttggtttccagcttcagagtaagaggctgtactatatggtgatattaacattgtttccagtgctaaacattctgtgatgctaaattgagcacaggattttcaacagataaactgaagtatagataatcaacgtgagaatttgtggaattcttttacatatgttaaatgttcactgtactcatggtggggttactcaaaatgtagttgatataaggaacatgtgttctagtggcaaaaaaaatacgtatagaaacattagccattgatgtgaaaaattacagcattctgaaaagataatgtttaaaaagatagtgagctaggcatgttagggcatgcctgtagtcccaactactttagagactgaagcaggagaatctcttgagcccaggagtttgaggccagcctggtcaacatagcaagaccacatgtattaaaaaaaaaaaaaaaaaaaaaaaaagatactgctgctgcataacaggatttgaagcttctatcttacacatagtactttttagttacctggtataggagattatcatgagaggactgtttttttttttatttacaggtaatttctgaacagggaattagcacaaaattttttaaaacagtaaatattgatatctacatgaaagctgatgtattttaggaattttttaaatcttttttttttttattttgtaggttgtttttgttttagcctgttgagagagtctgcaaataaatttaatgagtagtctaaaaactaacttttttttgattgctatatcctagctcttttatctttggctctcttctccttattaggatgtgaagtaattctcaggagaggaaatgcatctagtttttacttgatatcaaggactctaaatcactggcttcagttttatgtaaactggaaatgtaaggaagttggtattttggatggtattttggctggattctacttgatgagtgtttgacccaaggtgctccttatatctggaaaacatttgggattgctgatagtttgggaaactaaatttgtggttctatttcttcaagacacagatagtgtcgtttccacctgatactcattaaatatcagtttgacaagaaatacattttgaaattatgttcttcatttccttcaatgtggagtactaactgtgtttctgtcctttaggcatgtgattgtgaggacctctcccaatcacaggtacacatttacactgaagacacatccatcggtggttccagggagcattgcattcagtttacctcaggtaactcagatgttaatttgttctcttctgtttttgaaagtcatagaatatgaataatctgttcattttaagcaagcatcaccctgtgactgtattgattcatattgaagaaaaatatctaagtattatataaggaatttaaagatacagtcttcttttttttttttttcttttttttttttaagacagggtctcgttctgagacccaggctggagtgcagtggcacgatcatggctcctggtctcaagcaattctcatacctcagtctcccgagtagctgagactacagtcttgtaccactgtgcctgactaattttaaaattttttgtagggatggtgtcttaactgtgttgcccaagctggtctttaactcttgggctcaagtaatcctcccaccttggcctctcaaagtgctgggattatagggtgtgaatcatcatgcccaacctaaagacagattcttaattgccagtttttgctatggctgccttcttttggcttgattttttttccctaatttttaaagattttgcagtaaaatcagtcagctatcacataaagcgtcaagttattttaatgttaactgccagggtaatagaaaagtagaaaacattttatttgtgaagttgatatctaagaatggtgattttataatgtgatggcgttatactaaagaatttggaaagagtctcaaattacaacataatttgctaggctcccataacaactggatgggttgtgattacagttacaactgttgatggattctgtagaatccagagaattagattgcttagtgctgtcccaggcacatcatacataatataaagcaccaagaatactagtctgtatcctcttctcccttatcattttactcaggctgctgactgtccccagtcctaagtaatgtaaatggaattcctacctcctcctagtatgctaatgagcattggttgacttccctgaaggtttagagaaagagatcaaacactcatttaagaactattaggctgggtgcaatgactcatgctggtaatcccagcactttgggaggccaaagctggtggatcacttgagtccaggagttcaagaccagtgggcaacgtggcgaaaccccacctctactaaaaatataaaaattagctgagtgtggtggtgcatgcctgtagtcctaacttcttgaggggctgaggcaggaggatcacttgagcccgggaagttgaggctgcagtgaggcgagatagtgccactgtactctagcctaggtgacaaagtgagaccctgtttaaaaaagaaaaaaacaaaaacaaaaactattagatgggccaggtacctcacgcttgtaatcctagtgctttgggaggtggaggaggatcgcttgagaccaagaattccagatcagcatagcgagacccttgtcccccgcactagtctctacaaaaaaaaaattttttttaattagctgggcatggtggcacatgcctgtagtccaggctacctgggaggctgaggttgggaggatcacttgagcctaggaagtcgaggctgtagtgagctatgattgtgccaccatgctccagcctttgctccagagtgagattctgtctcttaaaaaaaagggaaaaaaaaggaactattgaagatctcttgaagccctcaaaaattacaggaaattttcacttactattccacctgtctgtttgatgcctcttcattatccagaccactttcacgtttgtttctatagattaaaagtttgggatattccagggttctccagcttttacagagttccatttgggattctgattgttagcaatagcttgaggtgtgacagtttctccttgtctctgttttgtaaaaaaaaaaaaaaaaatttccccgacattcactgtaggccagcctctattctaggtactttggcatgtgttagctcatttaattctccaaacaaccttatacaatagctactgttgttatccctaaggactgttgtattagtccattttcatactgctatgaagaaattctggagactggataatttataaggaaaaatgagatttcatggactcacagttccacatggctgcagaggcctcacaatcatggtggaaggcgaaggaggagcaaagtcatgtcttacatggcggcagacaagagagcgtgtgcaggggaactgccctttataaaaccatcagatcttctgagacttactcactatcatgaaaacagcatgggaaaacccacacccatgattcagttacctcccactgggtctctcccataacacatagggattatggaaactacaatttaagatgagatttgggtgggggcaaagccaaaccatatcagctgtctttgggattgaagtacagaacctaaatgtggcttccttgtgacttaaagtctaagcttaacgagcatggtgctaaatttcaggttggccagaagtgggatggggttttacagaagaggtcttctgggggaggtgaagggcagagtggagggaaacaggatgtggtaagaaagccacaagggagagcacttgttgcacatattcacagttcagtgtcttctaaattacccgccacaaagtctgcagtgtttggatgggcaggtgaactactgattttcaaccaaaaattgtttttctcattgttctttggagtgttatcagtaattactaattttgaatctataccaagcaaaccccagattcctgcctaaacacaatctggcctgccttcatacttcttgccattgtaaacagtagggatttgggaaagcctgaaatctagctgtaaatgtctaaaaatcttctggctagtatacaaagagtagccatgaccatctaatgatttcagtccctgactgggtttcaaaatagattttctgaccagttttaatttagtcttcatgaattgaatgtcttcctttttgagatactgtaacaaacagtaaaactaactgcagcagtacatttagaacactgaagtgtgatctgatacagtgaagaccttctgtagcatcatattgtgcaaaggaacatcctcctcagtggtgccagctttactgcaaaaggcaagctttgcacgttttgaaacagatgttcagatgtaaactgtagcacatgctttactttcctagggtaagtaacaaagaaccattactgggtagcttaaaacaacagagatttattctgtcaccgttgtggaggccggaagtctgaaatcaaggtgtcagtagagctattccctctctgaaggctctagggaagaacctgttctgtgcttagcttctggtgttgccggcaatcctttggtgttccttggctgtagctgcatcatttcaatttctgcctctgctatcacatgatggcattctgtctgtgtgtctatgtctctttcttagaaggacaccagtcatatcggcttagggttcaccctaattcattatgacctcatgttaacttgatacatttgcagagattgtatttctaaataaagtcacatccacaggtgttgggggctaagacttcaacatactttggagggggagagcacagttcaaccataatagcataccatgttttgatctttgagtgtattcctaaaattcattaaaattcctctttttctcttgtctaattttgatggctttggttttaagtatctttttttctcctttacagagaaaatgggctgggctttctattgggcaagaaatagaaggtaggtatattttttagccacctgataaagattttctatgtgattttctcacagttattgagatctgtacaattttctattactagtggtcagatcttaaacattcattgtatcagaagactggttacatctatgagaatgggaaggaaatagttatggtacctctgttcctatatcttttatgaagtgtgtgataaggtcgtcatagttcaaggcaaggaaagcaatttatgacttccagttgggggcgtggcggggtggaaagactaagctgctaatagataataagccaaagaactaataagcaaaaagtggcattgtctcaggcaatgtggcaaagttaggaaatggagtatgagtcgtctttagtcagatgattttatgtcaacttcatggatacagtaggggaaggaaagaaaatgcaagtgtaattaaaccagcttttcttctgcttgtctttaaaacttaaaaaaaaattgtatttatagaaaggttgcaaaaataatacgaagaatttctgtatactacctttacccagctttaccaattgtcatattttctttatcattctggctccctgtcttcctctctgggtctctgtctctctctgtacacacacacacacacacacacacacacacacacacacacacacatcttttatcctactcctcatttaggaacctgacaacttgtaattttttctaagttagatggaatttaaacattggggttattttattttattttatttttgagatggagtctcgctctgttgccaggctggagtgcagtggcgcaatctcggctcactgcaacctctgcctccagggttcaagcgattctcctgcctcagccttgcaagtaactgggactacaagcacttgccaccacacccggctaatttttgtatttttagaagagatggggtttcaccatgttggccaggctggtctcgatctgttgacctcgtgatccacctgccttgacctcccagagtggtgggattacagatgtgagccaccacgcccagccaacattggtgttatttttagttagctttttctttgtggaagtatgaacacttgttaaatttaatgagaaagtggggtagtatgtagcttaggtttctaattttcataaattaatttttctaaatatgaggctaagagtacttaaaactttgaatctagatattttctattgtgacaagatacagaaattcaagattataaattttgatgagttgagaaatgtgttttgcggtttaagttataaaagcattcttctgctaacagaaatgcttatctggattgtaaagtcagatctttaaagaagtggctcaaacagacttaataagcaaaattgtaaaacccagtgataggtgggactaaagtggagtaagcttgagggaaggtagggttttggggcccaagtgatgtggatgatgtagccataaagatagaaaactggtttggtttaagtagtgatgtagaccaagataggataggaggtgtggtttgaaggagtgctcaagtattctggaatgggagttccgtaaggtgaaacattttagtcaaatcagtgattttagtctgagggaatcttctggaggaatcatttagtcggtcttctttccatctggcaatgccatattttaagtgttacaggctgatgttttgaccactatatatacacctattattgtaaagtccaagtttattcaaagaactggatacacttattttttgcttataaaatctttcttattagtcttttatattaaattactattagccgtaaaataagaaaacattctcaatcttctttgatccaggatgaaatcttcaggactcttgtccctttgggactgaccatggtgctgactgtggtgctgcctgggatactgtccatggtgctgcccatagcacttgaaattgtaacagtttggtcttttctatttaggaacattggccttaaattaaaatgcatttgaaaactacagtcagtgcattactacagtcagtagtaattatatttttatttatttatttttgagatggaatctcgctctgtcgctgaggctggggtgcagtggcatgatctcagctccctgcaacctcctcctccccagttcaagcaattctgctgcctcagcctactgagtagctgggattagaggcatgtgccaccacacctggctaatttttgtatttttagtagagaaggggttttgccatgttggccaggctggtatcgaactcctgacctcaaatgatccacctacctcagccttccaaaatgctgggattacaggcatgagccaccacgcctggccaatattttaaatatacttattcaaatttctcagtatgaagatgacatgaatatatgtatatacacacatatatatgcattatgacattatgatattgttttggtgtctttaatgcacaaaatggtattatactgtacaaacctttctgcagtagacttttgtcactcaatattatgttttcaagggccatccatctttttttgagatggagttttgctcttgttgcccaggctggagtacagtggtgtgatcttggctcactacaacctctcctcccaggttcaagcaattctcctgcctcagccatctgagtagctgggattacaagcactcacccccacgctggctaatattttctatttttattagagatggggtttcaccatgttgaccaggctggtcttgaactcctgacctctggtgatccacccacctcagcctcccaaagtactgggattacaggtgtgagccaccacgcctggccaggccgtccatctttaataaatatacataaagttggtttttgtttttttgttttttttttgtttttttgacagggtctcacttggctggagtgcagtggtgcagtcgtggctcactgcagcctcagtacctggctaattttttaattttgtgtagagatagggtttcactgtgttgcccagtctggtctctaaatcttggacttaagtgatcttccctccttagcctcccaaagtgctgggattgcaggtgtgagccactgtgcctggccaagttttaatttcaataaaaattgctgtaaagtattctacattatgaatatactacattttattcattgttctcctactgataaacatttttcaatgtttaagtactataaataatgctgcaatgaacctccctgtagatgtgttgttagacaaatgttctagcatctttctgggacagacatctagaaatggaattgctgaatcatcatattcatttttacattaatatttcaacctataaatgttttcaaactacatgagggaaacaactaagctcttttgcctatcaaagttactcagcatataacctgtactttctaggattttttttttttttttttttttgagacagagtttcactcttgttgcccaggctggagtgcaatggtgcgatcttggctcactgcagcctcgcctcccaggttcaagcgattctcctgcctcagcctcctgagtagctgggattacaggcatgcaccactgcgcccggctaattttgtagtttttagtagagacggggtttctccacgtttgtcaggctggtctcgaactcccgacctcaggtgatccgcccaactcagcctcccaaagtgctgggattacaggcatgagccaccgtgcctggccattctaggaaatgttaagaaggagcaagccatccagaattggagacaggagagtattctgaaacttttagccaaaatttgaacttattatttgatcttcagtgagttttatgttccttcctcaggctttgttattttgcttttgaagtagttaaaatatgtatatgtccccctttaaatacagaaatctgattatacaaacaatttcatttaaagagtttacagaaaatcggccgttcgtggtggctcacgcctgtaatcccagcactttgggaggccaaggcaggcagatcacttgaggtcaggagttcgagaccagcctggccaacatagtgaaatcctgtctctactaaaaatacaaaaattcgctgggcatggtggtgtgcgtccgtaatcccagctacttgagaatctgaggcacgagaatcacttgaacccgggaggtggaggctgcggtgagttgagatcgtgccactgcactccagcctgggtgacagagcaagactctgtctcaaatataaaataagagtttacagaaaatccttgtacataactcaagggtctagaatttaagaaataagtttagaacagaatttagagtgtgaaacgaccataaagacttatctagttcagtcttgatttatagatgtgacaaatcaaggcacagacaacttaaattatttacttggattcttctgattgctagcagaatctgttgaaacacacatactcaaagtccctttgaagaaaacagctttgtttgtaaaccactagaatctttgcaacagacatttaatactgcacagtgacttcttttgtttacctcttgctatttgacctcagtaactcacagaaatgccatgcctgttgttcaaagcaagtgtgaaaaaacagtctttgtttataacctgcttttgtggtgagaactgtagaagctcacttacccaatgtgacttggactggtaattaagtgaaaagttggttaaaggctttttcttggaggtgtggtccatggattggagttctgtattatcttttgtgcatacactttacccataatttccaggtggatttctttgaaatggctggagaacttagactttgtagagcatctgagagtgccaaaacctcttggatttttgtagagttcactcccaaccttttctaattttaatgcttatacctagttagcagtattttttttttctagaagaaacacttcatttaaaaaattttcccaaagctttcaacttataatatctattctagaatgtcaaagtcattgtaataacagttcaacaaccaggccttcagaagtttttatactatttaattatatttcataattaactgtaacaagtgtaactagcacagacagataccagaatgaacttggttgacccatgatgtgtagcaactcctgtctacaagctctgagcgttaggcaaaccataggctgatgggtatatgttggagggataaaagttggtcagctttctgatgactcagctcagtggaggttgcttacgagagctgctactgtatccttaaggggccattggtaaattttaggacaagtatcttcagggaacctaaagggaaaataaatgtgtgtgtgtgtgtgtgtgtgtgtgtgtgtgtgtgtgtgtgctcgtgtgtgaagccttattgaagagtagcaatagactctttcttactaggcgtaatcaagttgccctcctggggaaactcaaatgcaaaaatcctcttgaacttttctgggtagcctactctactctttcctaatagtaccactacagtatacagcactgtaaaattttttgctttaaaagtttgtttataaactggcatttataagtatactttttgagctgatttaagaatcaagtttttttttctagggaaatgcttctttgtaattatctgtcactagcaaaatttgttttaacatatatttttctaaaaatatgatatgtaaactgtgttgtagttgtacaattaaaggtttttggtcgaacagttattacatgatgtaaaatcatgtgtaacactttaatattaattacattgtaacctaaaattcattttaaaactttttatgtggcttgaacaggaattttcttatccaaagctttgtatgtatgctttattgcctcctttgttattagcatggagaccatgggttttctgttattgttgtttcatttaaacagttcatgaatatattaagcacctgaaagaaactgttagatgctgttaataggaagaggagttaaaaacctcgtccttgcccttatctacatgtgtacatgtagaacttactgtagttccctagatgtagcaggtgctcaggaaacatttttgtagtagtaaaaaagaaatgtcaaactctaacttgctctggagcaaattccgctagtaaacattgtttttcaagcttcttttttttgccttgcgtcctactttcttaggccaaaataattcatccacatcccaccttagctgtttttttgtgtcaaacaaaaatcttatttggaaatagcatgttatgccaactgtgttggggcatcccatactgtattgcattaaatgaggagaaagatgcagaggccatgtggggaggattgtgatcctgataagagtgggatgagggataacaacagagagactgccgttcaatatttctttctttctttttttttgagacggagtctggctctgttgccctaggctggagtgcagtggcgtgatcttggctcactgcaagctccgcctgccaggttcacgccattctcctgcctcagcctcccaagaagctgggactacaggcgcccgccaccacgcccggctaattttttgtatttttagtagagacggggtttcactgtgttagccaggatggtctcaatctcctgacctcgtgatccgcccgcctcggcctcccagcgtgctgggattacaggagtgagccaccgcgcccggcctgccattcagtatttctaattaattcagatggggaagaaaatctctagtgactattattttttaaacctgtacctgtgtgtccctccagtgaaggccatttaaaccccatttttggtgaagtagtttatgattcatttatgtgaaacttttagttactagaaacactacaggtattttgtactcctgtgatttttaaaaaaatgcttctttttttcccctagtctccttatatacatttgacaaagccaaacagtgtattggcacaatgaccatcgagattgatttcctgcagaaaaaaagcattgactccaacccttatgacaccgacaagatggcagcagaatttattcagcaattcaacaaccaggccttctcagtgggacaacaggtagtttttaattttctttcattcctttaactttataggtattctaatttctgcagttttccaaaattaattccaccttttaaaaagtgagaggggctttgcgtatcaactcgtatatccaaggtgagtgataaaagtgagggagatgtatttactgaacttcaaggagtctgttcagaaaaattctaaagtagcttttagattaaaatgtcatgtataattatagcagcttttccctcagcaaatttgggaaccctgtggacatatatatctgaaattcctttttatatcataggacatttgttttgcctctggaatgtctgtctctttcactaatatagttctgtagaaaatgtagctcttggccagacatggtggctcatgcctgtaatcccaacactttgggagactgagttgggaggatcgtttgagcccaggagctcaagatcagcttgggcaacaaagtgagaccctgtctctacaaaaatttttttaaaagtagctgcgtgtagtggtctcaactactcaagaggctgaggtgggaggacggcttgagcctgggaggttgaggctgcagtgagccatgattgtgccacggcactccagcctgggtgacagatcgagattgtctcaaaaaaaaaaaaaaagttcttattttggttatgggcttatttgagaatcttaaaaaactgaattcctgctagataggaaaaggatatagtacattattttaaaaagagtactagaattggaatgaacctcaagagattaccttatgtaactccacatatacaaatgaggaattttatttttttattttttaaaattttatttatttattcatttattttttgagatggtgtgttaccctgtcatccaggctggagtgcagcggcaccatctcagctcactgcaacctccgctttctgggttcaagtgattttcctgcctctgcctcccgagtaactgggataacaggcatgcgccaccacacccgactaattttgtacttttagtagagatggggtttcaccatgttaatcaggctagtctcgaactcatgagctcaggtgatccatccgccttgacctcccaaagtgctgagattacaggcatgagccaccatgcccaaccattttttttttgtatttttagtagagatggggttttgccatgttggccaggctggtcctgacctcaagtgatcctcccacctcggcctcccaaagtgctgggattacaggtgtgagccatcacgcctggccaaatgaggaatttaagatctaaagaaggtaaatggtatgcccatggctacacagctaagggacatagttgagataagaattaattaaacacatatttgatagtacctagtgcctagtaccagtcactgttttagacactgcagatcggcagtgaacaaaatagatatgatccctgctgtcatagaacttactttctagttgaagaaaacagaaaataagacaggaataccatgtacagttaggtctctgatgaaagtagatcaggacaattcaccagagagctattgcggtgctgttgtgtattggatgaccaaaattgtgctcagattgcctagctaaacttgatggtttttacctttgcttttagttttagtatcctaatagaaaatgtttaggagaatgtttaatagaaaatgctttggtatttataataatttaaaactcagtagcatgtagaagtcagtaaatccatgaaagagaatctttcgtaattcagagaagaagtaaatatcttactccagatcactgtccttaactgtttcttctcatttgtggtatctcgtagtagcagaatggacagacagcccaacctgtaatatttaccattataccccagcacatagaagaagaccaaacttttagaagggactcagcaaagatttggtgaatgagtaattgagcattcagaagctgtctctgcacttgtagggcaagcattttgtactagtgatagaaaagcaggaattgtagagtcacagacccagggttgacttctggcgctctcatttactgtgactttgagccttgttgcatagcctgtttctgcatctcagcttcctcactagtaaaatggagtcgtagtttctgcttccaagagtgtttgtgaatattatataactggctgtagtgtttgaataaaatactaagaaactttattctttgttagaaatagtaaatgtggtactcttgaattactttaggtggcactctgacatttaaattagatattttttatccatgtggaagaaattttaaacatgagttttgcagtcattttgtaaacactgatcgtaagtgctaattcccttttcttcattggctgtgagtagtttgtttgaggagcagattggagaggagtatataagataaactggttttctgcatttgaaaaacattggtgatgatctgaggatcaaactattatattatgaagtgatttttctccccttacctcttttctacatagcttgtctttagcttcaatgaaaagctttttggcttactggtgaaggacattgaagccatggatcctagcatcctgaagggagagcctgcgacagggaaaaggcagaaggtagcttttatttctgatcatctttactagatcatctttataatgtaatttgtgcagattgattataattttcctatctgttgcttagtgatttttttcatattgtgtacccttttaagatagtagggagaaaaaattgctttcatagccatcattgttattaaaatatagcttaaaatgtatttatttgcagacctaatattaatgtaaaatgtagacgtatatgtacatataatttgcttgaatgcagatatttattgtaaataaataataagaaacgcattattggaaagatataggcatggaaataaggcatgtaagaattgtagaagaaagttatgagaaaagtaaaagtagctcagatgatagtctggaaggtttgctttgcccagagagacctcatttccccctcacttttggccttgctttgagaagtccagaagtttgctattagactactaattattgtctttctctacagattgaagtaggactggttgttggaaacagtcaagttgcatttgaaaaagcagaaaattcgtcacttaatcttattggtaagatttacagtttttagaagatttgaaatgaagtgggcctatttctatatgtaactcaactacagtgatttccaaatggggaaaggaaagaggggcatctctcttgagagagtttatcacagaagcatggggtatttcctgttggtcagtttgctgatgaaaacgtttaaaaccttcatctggatcaactttgtccaatagaaatagagtgtgagccacatgtgtaatttttaatttcctagaaattgcactaaaataagaaacaaattaattttttaacttttaattttgagataattttaggttcacagatttgcagaaatagctcagagaatttctgtatgccctttaccagcttaccctgatgttaatgtcttatttgacattttcaaaagtacaatgataagaaatgaacatggtttcatttctgctaactaaactacagattttattgagatttcaccagtttttccattgtgtccttttctgttccaagatctaatttaggatcccatattgcatttagttgttctgtcttttgagttttcttcagtcactgacagttcctcagactttgtcttttatgactttgagaactggtcagttattttgtagaatgcccctcacttggttttgtgttaaatgagatagcatcatcatttcttttagtgattaagtgatgaatgtgcaggtcaagtcttcccagcagattcatggttcagtcctactcttgtactctagcacaatttttgtcatattaaaacaattgcagcttattctctgagaatagtaactcaccagaataatgtgacattaactgggcattaattcttatttttggttgatttaactatgttgatgtctaccctactagagagtagagggttttcattggttgcacatcatcatgtccagggtcacttaacagtctttgagtgcgtggcctttatttcctggtccacaaattaccattcccccttattgttttttgttaattataaaatattttatttataaaatatggataggcattcgaaaacaattcacacactgtaaaatttggttctgttttcatagttttgtaatttgctttttttgcttagcatgtttcaaacatcttaaatatacacctataacatgatttttaatgcctgtatgtcattttatgaaggtaggatgtattttcctgttattgatctagtacatttatgaagtgacttctttgtattttatttttgtgtaccttttgttaagatatcccaagggagttgcataactttcataggtatttctaagtaatccatgggaaaaaaattgtgtagttaattggcattcagtaaattttgcccacaagagggcagtagagtgtaagaaaaaaatatttttcatcgctttccaaaggaaatcttaaggcctcaaaactctaaccataaaattatcatctagtataaacttttaaaaagcgttactttatttttaattgacagataataattgtatatatttatagggtacaatttgatattttaatacatgtatacattgtagaatgatcaaatcagcctaattaacatatcacctcaaatatttagcatttcttaggataaactttttttaatgtgacattttcttccctggttttataaaaaccatattattactttattttttgtttataatagagcatactaaggtacttaatttattctttgtttgaaatagtaaatgtggttctcttgagttactttaggtggcactctgacatttaagttagataatttttgtcctcttgagaatttttaaacatgagttttgtaatcattgaagtctttaggatgatttcagacttttgtgtccaagtgaagagaaagcaaagaagacatcaaacttgttcagtatatttccttaggctgaggggttatatgcccaattacctgtataagcttaatctggataaatatatgtattttaaaataaacttgcgttaggagacttcagtgactgcgagatttcagttgcatttctgccagctagtgttgtcttcatcagatatggcatttcttctgatcaaccgagttagttaatttagttagattgaaggttaataaaactaagttttatggactgatacaaatagactacagcataagtttagctagtcattttgacagtgtgttaccatatatggagatcagacaaagtagatagcatagcaaaacttacccttctgactgtaaaatcagctaagattatattgttcgttttgtatatgtaagggtagcttttctttattcatttaggatgctcagggagttctgtctgtctttttagacttagtgataaagtccttgtttcacatttgataatattcgtttgacataggcaaagctaaaaccaaggaaaatcgccaatcaattatcaatcctgactggaactttgaaaaaatgggaataggaggtctagacaaggaattttcagatattttccgacgagcatttgcttcccgagtatttcctccagagattgtggagcagatgggtaagtttaaaaaggaaaatgttataaaatcttgtgttgttaaaaaaattaatgcaatgaagaatctcttttcaatagttttgaaattatttttcagacccattatttttgtctttttctttaaaaatgaacagataaattttctgaaaaactttataataccagaacttttaaaattacattttaattttatggggaaatcatagaaataagacttgtggtggctccattttgtttatttatttattgaagaatgcttttctatggggcatatttagaaacttcccctgacagtaataatactagtagtgactccattttatttatttatttgcgtaagaatgtttttctatagggcatatttagaaagttcacctgactctaaagatcactatgggtcagatgtaccctgctgaataataactatctattaggctgtgtgcattgttctgacattagctgccgttcctttttattgtactgttgcattacccagttagtacatcttcatacctaataaatgggtacttgcatatttttaaattaaataagtttgatccaaaaagacaaatgcaggatatacattggagtttctatattgcatacaaagaagtgcactattcgtttaccactttcttcttgaaggtttatttaatttatctgtgtgaagtgactttatttgcccagtggaaatgctgtcatgactgttttcatgtccatatcattcgttggattggaatgtgagcaacagaatatctgagaaaggaatgtataacataacagcttctggcagactattagtgtaaaaacagcatccaaaaaaaaatggaaggaatatgaatatattactccgctcatccccatcattctttatctttaaattgctactggaagataaaagtatatttattatagtggggataagaactgctttctaggcactaagtgcttggattgtattagccttctattgttggtagcctttctgcctggtcgctcactctgataaattacaggcacggcacacacctgttcactgagtaaaggtcgagtttggaattggattaagagaaaatgacagagaccctcatcacctgagttttatacaccttgaaatggcaatagcatactttttatctcaaagatacaaaggccacgtccattaaaagcagaattttaattgggaaaatattttaaaatgtggtagttcactatcttggtaatgtgtattttcgatcaagacatgaaaatattgtttaagtgtattttgggtaaaagcagggataaaaagatgattccaaatgttgtaagttattcttgtggaatgtttttactggttttcagaactgagatctagtgcaggaagagtctaatgattctgtttcttagaacatttatactgtttagccaaaaagtagaaaaataactgcattggtagtaagccgtctcttttaattataaatgttttctcactgtttggaagctattgaagataacagttattcagatactagtttgctatttgtgcattatctagatcctgcacttgaagctacgcgcaacgtcagtatgcgttgggtagataatgcgtaaaggagttggtctcacattggtcagtttgtgaccttgccagctgttggagagttttaaattaaatcagaacagatttggaatttgttagtgaatttcatctgtttctgatatccgtattgaaatgagctgaattacagtagtgtgctttttgttgtttttgatgtgttttttgactaagcactatggatttgaattttgtgagtgccactgtccagaaccttttttatggatttatttttctaatatttttacactaatttaattagacaaaaaatgaattctatccttttggaaaagttttttttttttttctctttatggctttttgccatcaggaagcatttgttaccaatttcattgaaaagacaaactagtataaagctgtcctggcttttgagctgaattgaaaaacttattttctttattctggatgaagtttctgggtatctaaaaaaaagtaaagcttcttcttttttttttttttaatggttaaatggctgagaaataattcttttgtaatgcatgtataattccctgtcttccaatagaggcttcttttttcctttgaattttgggggaattatatagtaaaatcctttcttgcactccaattacagtgtggttataaagttctccttaggctttggtaaaggtatataaataaaaatggttatattttgacagaatataaataaaattatacaaattatttttatgcatattctgtgttgtttttttttttgacatgtcaggtgggaacaacatggatttttttcccccactctttgttaactaaatagacagatctatatggtttggggattcagctggacactgagtatgactggttaaatcagttctaatttttaaaaaagattagaaaagaataatttatgtaggttatggggcttttttgttttaagcagaaaactttacttttggcttgagaccaaattactgtctttaccatggagtctaaagtgatgtctacttcgtaaacaggaatcttaactaagtggattttttgcctatatatcaattttcaaatttacaaagtgataaatttagaatattcttctcttctgtcattatgttcatcagactgataattatgcttctaggtaacagagttctttctttttgtctataaaacttcatgttgccttttcaaaattgaaaaatatagtttagctacgaacagaatgttgctgatgagatataggaggactaaaggacttaacgagaggcacacaattaagcagtaaaattagggaaccaatgaggtaatatacttgaaaataactgtcatggagtttccaatctgttagtttctctcttgaaggtctttcaaataggtagtgtataccttaggccgggtgcggtggctcactcctgtaatcccagcacttagggaagccgaggtgggcggatcatgaggtcaggagatcgagaccatcctggctaacacggtgaaaccctgtctctactaaaaacagaaaaaattagccgggcgtggtcgcgggcgcttgtagtcccggctcctcgggaggctgaggcaggaggatgtgtgaacccgggaggcggagcttgcagtgagccgagatcgcaccactgcactccagcctgggcgacagagcgagactccatctcaaaaaaaaaaaaaaaaaaaaaaaaaaaaaaaaagaagaagataatgtatgcctttctgcttttgtagttttgttatatttttgtagaattaaaatcaaggaaacccttaaaggagaaaggaagtcacataaagctctctagactgagggataaaggaaaagggattatttaggggaatatcaatttagacttttgtttttgttattgttttaatcagagcaactgttgagttttccccttgtctgaagcagttgagctcacccaaacccaagtggggcagcccttccttggaaggatatgagagcaacgagcgaagaaaactaaacctataccttgcacttagtaaataccaaatagatatttagttagaatgccttccaaccccccacaaaacagatttttaattaagaattaccttaaatccataattttatgggctaatagaagccacatttgagtcccagggtagaaatgtgaacatcaaagctggtatctggaagtatgggtgaataaattcaacagctgattgctgtctttcagcatattcaggtgttaactgaatagatactgaatacttgtgttcggacatttaccacacttattcccctgtatgcagttttgtggacagtgttcaggataaataaatgattgattacctcagttctcactgtagctattttgttagcaaagatagcgtttctgccaagaaacttcattttttcagcatccctggcaattctctctaaattataaatgtcaaagcaaaaaaacacatcgttttcaatgaacagtggaataattgttaaagaattagtcagcatctcttaatgtaatcctgggaataggttcacatctacccaaggaaagacctagaaggaaaaggatgtaaagagggaagacctcagcctcacactgtctttcagtggatctgtggggtgtagatgttcaggccacctagtggggaggaaagccacttgttatggtcttgtgcccccattctttgaaactgacactgtgttctttttggtctcctttccccagtgtctccctctgtaagcccattttcaatcgtatttttaaggtttcttttgaaattcaagaggaaagcaactcttttctgatatcataagtgaaattgtagttactctatgaaacagaactgctgagaagataaggaacctttcaatcacacagacatctttcacatactaaaaacagtgcaaataaaacatagtggaagaaagggcactaaggttttgtgcatgccatattttggagagagggagttcttgctaagattaacataaacactgacactcttaaaatgcattttcacacccccactcatgaggagagattgcattttaaatgggggttaagacatccaggcgaactccagggctctgtaaaaggaaccctaaggctaaagagcttatctgaaatttgaaaaaaagaaaaaaaaatgaagccttctgacattcatctttttttcttgtattagtcataacttgcttttcagctatattttaggttttgaatgccaacctgacatctgttcaagtctgcctgtaatttattagcagaggaaaagacagcagttgctcactagttagagatgcaaaatttctgccttcctgttctccactaagtacttatagatgatacctggatacgaagaatgtaataatttactgaaaacttcaggtcaggaaatttataaagatttttttttaattagaagaataaaatggcttaagaccatgtgatttcaaaaatctctagatcaggatttagagacaaaacatagaccctaaaaaatactttagataactttctataaattgtaatttttttaaccttgaattaatttttccattggttttaaatttttaagttaaatgtatatttgaacagtagttgtgcttatatctgaaagtcaaactgtatgtaaattcacctggcattttgcatttatagacagactttaagaaacaaatcttttggagaggtagtgctgtctacagagtcaccaaatggattagatttcctggcaactacagttgagttacttacagatcaacagttgggtcactacaaagttgagatctaagtgttaacctgagtgcccaccagtaagaaaccggttagaggcaatcttaaaatgatatagctccaaatgtagagacatgtttgtgttaataaaaaatatataaaagcaaatgcattctaaaaatctctaaggacatacattaaattgaaaaaaggtttatggctgaatgtggtggctcacacctgtaatcctagcactttgggaggctgagatgggaggatcacttgagctcaggagttcaagaccagtctgggcagcatagtgagaccttgtctcatttatttatttttttaatttaaaaatttaatttaaaaattaaaaaaagtgtttacttccatggaagggaagctaagatggggaataaagggaaagttttgttcttttactcaattttacctttatgtctgaatgttttattgtatttctaatgtgtgattttaaaagccaacagacaaaagataatatcacagtatgtttcttggggtgactctaccatcagcatggaaagtcagcaggaaacaggtacatccttccgccttcatgaagttttctgtggaggaggagagtgcagggtaaaaggcctggattccaagggctttgctggcagccccttagagggtagacagaacacctatcctatttggtcaagaagagaaaaagtttctccatatataacaaactgctttcccccagaatgttctgcattatagtaatggtgtaagtagtctgcccttcaaacatgagaacatttgcatccaggcctttaggcagccaaggcagcattaaagaagaaagagtgggagcagagcgagctgagggagagcagagcttctgacatttgaggaactgggcgtgaatttgtttttagtcttcaaaaaccattctcttgaggaatcgaattcccatgactcctgaagtgaagcggttggtgttttctcctgcgttactcccatacgtaagttggtgattataatgagggtggtggctaatacttatataatgccagacgctgttctgtgtgctttattattgtgtttattaatcctcacaacaaccttcagaagtagacactgtattgtctccatattatggagcaggaatctctgtctcaaaaaggtgaagtaatgggtccaagacacacagctagtaagtagtagagtcagatttgaacccaggcagtcgagccccagatttcatttccttaaccattacatgttattctcccatgaaagcccatcgtgtaaaaccattttaatgggctttctagcttcacttttttggggacctttgaagcaatcattgaggcagcctttgttctagccaagggccaaccatggcaccattgagattttgagctgtataattatttggtctggggactgggtgtcctttgcattgtaaataactaacttttctagtaatctgatgtgttcaaattgtcatgagctcaagagacatgaagatttggtggtaggctgtaatacctaatgccacttttttcatgtgttttttgtcacgtgttgtagcagaatacaggaaggaaggaactggaatgggtgtgtcagagaagctgtcttaaactgtcaacctggagagggaacataaatgttaaaattaaataatcattaaaaaattaagcaacgtaacaagtgatatcaaaggccagtatttgattaagtgccagatgagcagtacaattgataagccctacaggaactgaaagggaatcacatcgagaagacttcatagaagaggcagagcttgagtaaggccttaaatgctgagcggttttggataggaggagggaaggggatagttgtccatatcctgggaagagtgacagactaaacacggtatagacttcatgacttagaccagtctaacagagctgttgtttggaagaaacaggaaataggattaaaaagttagttttgggttgggttgtggaaatctgtgaggagatgtggactctttttaaagtactgtccctgtttaagcttccagacagactcagaaccttccagacagactcaggtgcttctcctgtgtttccctgcaccttgtatatacttagaatccagctgtgttcttaatgtaattattcatttgcattacactcctaaggcagaatttcttaaccttggcactattgacattttaggctggataattcttagttgtagggcgcctgacctgtgcatcataggatgttaagcgccatccctggcctctacttgatgtcagtacttcccttcctcaccactccgagccccagtgacgattaaaagaaatgtgatgaaactgtcctgtgttgagaaccattgctcaaaggcctttgaaggcacaactgtaatgtcttcttatccatgtattatcaacatcaggggtgttgggatgtaggttgcaggtcattgttggaccatgaaccactgttaccagtccacaataagacaaatattggaaattaagaataagtaattacaaatgtttatagcaatttgacattatcacaatttttttaaaattatattttacaaaaatgttggtctgcaatggattggaaatttaaaaggaaaaaaaatacagctggaccttagcatacatagtttgagaagcactggcctatgtaaatatttgcaaaatgaatgaaattttttgaacagatgccttagagaaaaggtgaggcgaatagtcttagagaccagtagactattgctgtccagtgtgtggtacttagaatctggattggggtgaaggcaacaggaatggaatgggaagaaaatacatgaaaaaattgcagacatgaaactggcagaatttggcaatagttattgtgggtgacagaattggaggtgagactcaggtcttgtgagaaaatgttggaaatgagaaactcaggagaacatagttttggaaaagtagagaatatcattgcacatattttcaatatcgtgaaaggaaactggaagctgaactgaagagaggaagaattactggcatttcaatttattgaagcctagcttcaatcagtctgcacgtgtttaggaaacacactgttgactacttttgcttgaaataccctctttacttggcttttctcactccaagcatttctggttttccttttacctctctggctgtctcttttcaacctcttttgtgtcccttaaaatgttggggttcctcaggagtctgtctttgacctattatttttctctaattattctcctccaaattaatcacatctgtttcatagcttcaattagtatctttatgctgctaactctcaaatatgcatatgccacctcggtctcagtttagaactctggatttgtaccagcataatgtgttgggtatttcatgatcacatagtaagcttgaaattaaacacattcagttgccccctcagtcctctctaaacatgcatctatatctgtgttttctatctctggcaatactctagccaaaaatctggacacctttaactcctctctttccctcacctcccacttccagtaagtcgcagaatagaccgtcaattctgcaatctccgcaatctctctgaaatccctccagttctctctacctcgccctgccactcttccttcaggacaccattatctcttgcctgaattgctccataagccctcagccttgcccttctctaatccattctccacactgtaactggagtgatttttataaaaaggcaagtctgatcctgtcactgcactggttcaaactctttagcagcccgccttaactccttacatggtttacaagccctgtgtgatctggctcctgctaaactttcttgcttcgcctctcagcccgtgcccctcccccatactctgggttccagccagcctgtgctattttcagttcctctaatttgccatgctactttctcttacctctatatcctagggttatttttttttgctttttttttttcttaaccatcttttcatccaattcctgttcactcttcaggccaaagctttgaactcactgtttctagaatgagtaggctttaatgttcctcatgtgtgttctaatagctccatgttattttatgcattattacattgtattataattgcttattacatgtctgtattccaagtcctctctccatgtccctgccctcacaaacatagtataccttcagtaaggaataggccttgtttattttggtcactgtcgtattctctcctcccggcatggtgtctggcttataagttttcaggaaataaataaatgccaggaacttgattaatcttgattaattaaatagaacacttagacagtttgatccaagccctgccctcatgatacttacagtctgtgtgggagtaacactgtatttgcacatcccaaagcagtactgtgtaaaacataaggtgcattgtgaaccagattagcaaagtaggccacatggagaagcagcagatgcatttaaagagcaagactgagccatatctttaaaagtcaaagcagatatgatgtttataattcattactaaatccatgtagatcctcttagattctgaatttaggaaagacctcttggattggtcctgaatggcactaggctccagaaataagaaaaggaagagtattttcttgggtacttgtgagctaccatttgcttcattgggaactgccattcttatgtaagggcactataacaagagtgttcacatttaagggcatcaggtcaatattgcgtctgtgtgagtttgtgtgcatgtgaatgcacacatgtattttctatttttaaatagaaacacattataaaaataatgcatcctcataaaacagcacagatagagtaaaaagtgaaatctcccttcattctacccactccagttttactccctctcttagaggtagacactgtaaagagattggtatgaatttttcaaaccctttcctaagtatttatacaataatatataatcaatccattcattcatttattgagacagggtcttgctctgttgcccaggctggagtgcagtggtgcaatcatactccgttgcagcctcgcactcctgggctcaagtagtcctcccacctccacctgccaagtagctgggactacacccagctaatttgtgtgtgtgtgtgtgtgtgtgtgtgtgtgtgtgtgtgtgtgtttgtgtagaattggagtctcactatgttgctcaggctggtctcagactcctggcctcaagcagtcctcccgcctcagcctcccaaaatgctgggataacaggcatcagccactgtgcctgacttttttttttttttcaacctagtagtgtatcttgggtttttttctgtgataaagcacacagataacattttattttttaaaaagttaaatagtattagcagatctgcatccacacaagtcccgtcatggtaagttagcgtctcttcctcagcagtaagaaggctcctaggcacacaccagaacaaggttggcattgcgtctcctttctactcacttgtatggccctaggcttctcaatgcggcagggccctgggcgctcagctacttgagccttggtacccttgcctgaaaaattgtttattggtaggtaacattaatgtgtgtaagttttctaacacagtacctggctgactgtcaaacactccatggatgatagttacttggtatgattatattgccaagaggcacttttggagctctgtaaaaggcaaaaatttataacccaatccctttaatctaatgttaagatgtgttttcttcttatcttaaattttgttgctgttgaaaatagttaacacctgagattttcctcctatgctgttttataattacccattttgaacagtgtttgttgataaggtagtcaaggggacacttcgaaatattttttctttatttgtgaagtcatactttggctgatttatatttaatttttatcacattacatcggagaggagcagataaattttctatcacctctataaattttctatcacatataagaaagtgtatcttatatgtgatacactaacttggaaaaacaacagctatcttgatagacacaatagagaataggatgtcagaggaagagaagaattagaatgttaacaataatgctagtaaaaagctacccaggacttaaatggtattatttgagagtacttctaccatgattcaaataagacttgccttggaattccatatgatttgttacttagagcagtctacctttaatatgtttaatatggtcatactttaaaaaaaaaaacctgcaagaaacttgggtttcacgtttttgctttttaaagaattaacataatgttatttcaggtttgtaaaggaagttacagaagatagcaataaatcccttccatataccattttagtcatagtgcaaaattaggcattgaaaattattatgggtactgtattagatattcaaagatttatttgtggctttgacttctttaccaacacctctggctttaatacagtatcttttatcagagcaagtaatagtttgaatccttttcttacaaatcctctttttactcaagtgactgcaaacttataaagatgcacacatctgtagcttgaacgtctatgctatttgctcaagtatttacttgaatttatcctcgatgatatgattttttgaagtgctttgattttaaattctatctagaatcccatcatgagggagaaatcttagcaagacttaagcaccttttcataatgactggttactgtaggataaacctataattagtatgttgctaatccacacgttagatatatcccatcaaatttcaaatatacacaggagaattatccacattgaaggttattagtgcattccagggacatttccatgttgattcacaactacccctttaccttacactttcctgtgttactagacgtctctttctgtaaaacttctctttgttgttactttttacttttgtatgtgttacctgattactttggcttcctctgtgactactgagggagccaattgtggctgtgatgagcttagagaaagggagatggggaagactcgcttaaatgagttacaaattctctgtagtctgatctttatctggctattgcagtatgaccatgggtgatactaaatgaaatagaactcaactccccaaaatttggatttgtcttataagtcgtaatggctccaggtgggatactgtgtcagaccaaggataggcagatgatagtttattgccacagtcaaaagatcgaacccttttttttcatgttatctagaaatgaatctttaaaaaaaaaaaaaaaggaatgggttgaacttataatattttagcaactcataaaataacttgaagaaaaagatcatttggaaggagagacaaaacagactgaaagacattgtttaaatttatgacttttattatcttacttgaatgctatttttgcccctctcgctattattaaaccctttgcttcctgttttcagttgctcctgtcaaggtatgaatttttctttggatgattgtcatctatttcatattatctagtattcctctctattatgagaaaatcaaaagtagacagtgtatctatagctatagatttaaatgcactaaggtaattatatatttgaatcagagacctaaggaataatctagtgtagcatttaccaaatttatttaaacttaacatgcttacatgaagacagacctatttatgtttccaaggaacaccagtttgagaaatgctgatcttacctgtgtcattcttattttgtagatgaggacattgggacctcagaagaataaggcaacttatttaggctaaagtcactgcttgtctactggggctggaatccaggttgcttagtctggtgccctttaggcttcatgattcagccacttaagacaatttgatttattgttgggctttttaattctagatttcataacttggatatgaaactgtacttcccagtctccaaaataagcttcactgttttctggaacgtgaattagattcagaaagccccttactgcctttagattattgcagcctccccagtgggccccagggatccaggaaaaatatctttgtttttcacctagtcctctcctcagcttttagagggactcttagatctatgtttatgaaaagacttttattagttcttatagttgtagtaatgcatgtttattgtagaaaatttcaaaaatgtagatgaataagaagaataaaacaatcactcagtgtaaaaaacaaaaaaccctgaaaaagtaccattaatattctggagtatatcatccagctagttttagctgtatatacatagaaccaaaaaaaaaaaaaaaagcattttgctgttttataactggttttctccccactcagtaagttaacagtttttcttaaatattctctacaacattctttattttgtagaatgataatgctgtggtttgtttaatcaatcccctctagttagaaattgtattcagttttttactattatacactatgtttaacaagcaccttagaaactaaatatttctacacattcatatttctttaagataaattcctggaagtagaattgctgaatcaaaaaggattcacaagtgtaaatgtttttgacatgcactgccaaatttagacttcctttttgaaaagtcaaatgttaaggagatcaaagcaatcactaagcaggtactctggaagagaaatagaaatataaaaaatataatggtttcatgagaaactaatagacaaggtttcaagagacttggagtctagttttggatttgtcattgaatggctgtgacttttgggtcttagtttcctcattataaaaatgggaagatagactagaaatagaaactttttcagaatagtcaccttatgaatgttgtttcagtgaaatataaaggtctgtacataagttctgcagggaagatgccatgtatttgctcattcttcaagtttcagcttgattgcctttggaaggtctgtcacacttaacgtcctcctaatagaagtaattgttttactttttggctcctcatagccctttttaaatgttggttctgtatagttgtatctttgatttttaatattgaggtatttgtaacagaggttatcttactcatctcctgaaagcacttggcttagcatagttcttgggtatataatagagactcagtaagtatctgtggaagttgagagtgataccttgttccccagtgtataacagcaaagcctagcctcctcctgttgagcattgtctgttctcgctttgaagagctcaccacatttcttcagtttgtttttgtttttattttattttatttattttttttttttttggcggggtggggtctttcctattcagtaacacagtggttctcagtctttggtgtgtatcagaatttttttttttttttagagttttgctctgttacccaggctggagtgcagtcgtgtgatctcagctcactgcaacctctgcctcccaggttcaagcgattcttgtgcctcagcctcccgagtagttgggattacaggcacatgccaccatgcctggctaatttttgtatttttagtagagacagggtttcatcatgttagccaggctgcccttgaactcctgaccttaagcgatccacccaccttttctggtattacaggtgtgagccaccctgcctggcccagaatttttaatgttaaaaaaaatacagatttccaggctctcaagtacactgaatgtgagtgtcaggcacaaagccgagacacagcgctgtcaatagctgagctctccttggggttttagctttgtcaggcaaattgatattcaagttccaggtctgccacttaccagatgtgtcttccccttaccaggggaaggtcactttaccactgtaagcctcagtacctcttccttaaaaagagggtaaaaataataccttagctcatagttttaaaaatgattacgtaagagaacatattaaaacacgtagtatagcccttcccatatctgcagttctggccttgatctgtaacttcttggatcttatatgcatttattatttatttgtttctttttaaaataacatttatattttttcaacttttagaggttaatatgttcattatagaaaactgaaaaacacaagaggcatataactaaaaaatcatccataacagaatcagtttacattctgatgtatctttccagtccttgtatgtgtatacatatatacataactgagtatacctttttacatggttacacttatatagtatgtgccatgctttcttgcatatcatgagtacttgagtatcaaaatactcagggctttaggattcagacattggtaaatattcacgatacattttcttatcttttgtggggacaaaaatatcttaaaaaacaaaatggcaacaggtctctggaaatgcatattggcaggtttatagttaaatactgtgttcacttaatacccaatataaaatgagatacaaagcagtcaagtaagtataatgcttcttagatagttcagtatgagatctgcactattaaaatattaccagaaatgatgtttctacttaattatttaacaattcatatagtattcacaaagtataccaagaaaaaagcacacatatgtcagtggttataatcagattgtaaatatggacatatctatatatatctcttcccttacctttctttctgccccttccttagcaatccagtacgtactgatgtatactgctcataggtggtttaacattgccatttccaagatgcttcttttctaatgaaattaatttactatctagttaattcactagctctattttatacattgtcacctcataacatctagaaagcttagtgttgtgaagtaaggactgataaacagaggcactttactaaaaaatcacttcctagaactgtggctacaatatgaaactatcttctagatatgaacatacttgcaaagaaccttccttttgcctttcttcttccttcttcagctcaatgaataagtacagaaatgcatatagctctacgagatgggttaacaacagtcactcccagacaacaagccttgctaaaaactctaacaagaggacatttatcaaagaatcattttacttcttaaactttcagcatactttgggcacttctcagcattggggccttgtttgtcctttgcatactcaacaatgctaagtaaatgcacttgcagaacgacgagtagataatctgcatttatctcaaaacacactggcacagaactcttccaccgtcacttcctgtctctcccacctcctttactacccaatgagcaaagaatatgtagctcaaagagataaaagtttaacagttccattctaaagacagtcattcctgttaattgacataaacttacttaaagtgtgttattttgtgaagactacatgtttcaaacgtctactgtataatgatagcattgattaaattgtgtgcatataacaaaggctataatctgaaagtatcttcgaaatatgaatattatagccaagtacacttcaccttctcacttccttcttatcattatcagcccaaaggacaatatcagcgttccaaaagttgttttcagaagatagtcttacctatgaagttttcgggcatacaagaaaagtatataatatgttttagttcatcatctcttcttttgtcaaacattagcaacctctttatcatctagacaacaagatgtaaaattaggacttgcttgttcattgtacagataaccctcaatgggttatgtctcagcaaacccatcgtaagttgaaaatatcctaagttgagagtgcatttttgacttacagtattttcagttgactatgggtttatcttgtcgtaactgattgtaaatcgaagagcattaccaaatgcatattgcttttataccatcataaagtaaaaaaaattgttaaaagtcaaaccagtttaagtcggggaccatgtgtatacactatgtgcacagcaaagtaaaataaaatgcacagaacatgcaggtaatcttgcctaactacaaacacatggtatagaaccctttattccttcctacacttcctttgccttcctcctccctcagtccacaagcacagatctgtaccactcaaagaggaggtctaataatcccatttccgaaagacagtatttcattaaatttattaattccttttatccaggcatttagtggtcatttttagatgacctttaccacatatcttcagatgctttcaccgtccgccataagaatttttactgaaatgaattcttgaaatgtttaaaactttgttacattctttctcgttccacaagtagttatcccttcccagttacctttcttttttaggtctgtggagtcatgatacatctatccccttttcctttgtttttcatgcatttgtcaaatttattattgaatactcctaaattttttctgcctttatcatttgttttttctttttcattgctttagtcagttacccttgcactacagcagtagcctctttattatcttccttgcctttagtcttcttcctttccatcctggaatatttatttcagagcttactgtacaaaaataccagattctatcagagaacatcaaaggaatcacagaatctcagtattgcaaaggatcttagccatctagtgcacacacctgttttttatttgaatctcttctacatttctttttattattattattattattattattattatttttgagatggagtctcactctaatgcccaggctggagtgcagtggtatgatcttggctcaccgcaacctctgcccccctggttcaagagattctcctgcctcagcctcccaagtagctaggattacaggcgtgcaccaccatgcctagctaattttttgtttgtttgattgtttgtttgtttgttttgagatggagtctggctctgtcgcccaggccggagtgcagtggcatgatctcggctcactgcaagctccgcctcccgggttcacgccattctcctgcttcagcctccctagtagctgggactacaggcgcccgccactatgcctggctaattttttgtatttttagtagagacggggtttcactgtattagccaggatggttttgatctcctgaccttgtgatccgcccgccttggcctcccaaagtgttgggattacaggtgtgagccaccgtgcctggccttttgtatttttagtagagacgaggtttcaccatgttgcccaggctggtctcgaactcctgaggtcaggtgatccacccgcctcagcctcccaaagtgttgggattacaggcatgagccaccgtgcctggccttttgtatttttagtagagatgaggtttcaccacgttgcccaggctggtctcgaactcctgaggtcaggtgatccacccgcctcggcctcccaaagtgttgggattacaggcgtgagccaccgtgcctagccttttgtatttttagtagagacgaggtttcaccacgttgcccaggctggtctcgaactcctgacgtcaggtgatccacccgcctcggcctcccaaagtgttgggattacaggcgtgagccaccgtgcctagccttttgtatttttagtagagacgaggtttcaccacgttgcccaggctggtctcgaactcctgacgtcaggcgatgcacccgcttcggcctcccaaagtgctgggattactcatgcctggccctcttctgcatttctgctgagtaacttctgccaggttccttaggctaagcttaagttcctccagtgacaggaatctcactccctcctaaggctacattcctcttttggacaactataggtttaagtttagtcttccttatgttaaggtaagatgtatttgcttgtatcttctcctacaagctctggttcttcccctgaaactacacagaacaagcatgatactacttctttatgaacactctttaggtatgaagaaagctattgtccagacttccctacagattcctcttttctctaagctaattctcctaagcttggttggttttttctagccagtctttttagccctttaccatcctattcacgtttctgtgaactttaacatttatgtatattaatgttaagctgtgaaacctagaatttagtggagtaatgcaaatgtggtctctgttgtaaaatagatcagaactatttattctttatttaaaacactagtcctttaatgtaggccgaaattgtgctaacatttttgacatcgacattctatcttaatgcttatctagtttactaatgaatgaaattcccagtcatctctcacaaaactgtatctcccccagctgtactcaagtacagaaaacatctattcttgataacttttatcttgttagaatagctcttttctcttctatagctacaacttgtcagtgtgtccttatcagcttatgatttaattgaggctatagaacatatacacttaaaaaaaataagctaagaactcttagaataaaacaacataatgtattgtcagttgtaaccatgaatgatgtttttcaaagtgtgtcctctggcctacattagagttacttagggcgcttgttaaatattcagtttcactccagacttaatgaattcagatttctaggagtgatgtctggaaatctgcattttaacaagctccattggacattggtgcatattaaaggttgacagctgctactctaagtactgaaggattgagcccaaagatatgatcagaattaggtggcattaataaaggaggtgatttctggggacagaagaacatgaactgttagagtaggtagaaattccaggtgtagtaaagaagaaataaattgtctgctagggaagatatttgctaggctgaattaggggcccaatagaacagcacataaaaggagttaaaagctaagggacggaaggaaaaaaaacaaagaaagaaaaaactataaaattctgaaaccagtaaagatacatgctgccatttggcagcaaggcagacctgctatagaagaagcatgatctttgtcatcaagaattcatgaaataccaggcaacaccctatgagggaatgtaaaagggtgggggtgtcagcaaagattagtttggagcattgctacacacatctcatctttagttctaggctatctaatgagaaaatctatattaaatctaagttgactgatttggatatagaccagtcggatggtagacagcttgcacagctgcttggtgctcaggaaataggctgttttcactagcatagcaaaactcagagtgctcttggcattttgaagttggtgggacaacagcaagtctctaccagacagaatagtgccacgaaaatggatggtcaaagtcctgactgcccagatggtatcaggagtagtggtcttggtcttaagtatttccatttcttaaagatttcataagtgcacagataaacaagtgtagatgacaacctattttagatgttgattgagagtcttaaggccaggcgtggtggctcacacctgtaatcccagcactttggaggtcgaggaggctgatcacttgagcccaggagtttgagaccagcctgggcaacatggtgaaaccccatctctacaaaagaatacaaaatcagccaggcatggtggcatgcacctgtgatcccagctactcgggaggctgaggcggcaggatggcttgagcctgggaaatggagattgcagtgagctgagatagtgccactgccctccaaagcctgggcaacagagtgagaccctgtctcaaaaaaaaaaaaggtttttgaaacaaaaggccctcctatataatgagtcaatgaaagttatgctcttagagtaaataattatattgtactactgaaatggtaagtcaagtagaactaagaaaatactcatgactctagttccaatttacaattttcaacagaaccataagagaagttgtaattatggaaacttaaatgatcaaatattaatttgtgtccaggcgcagtggttcacacctgtaatcccagcactttgggaggctgaaatgggtggatcacctaaggtcaggagttcaagactagcctggccaacatggtgaaaccccatctctactaaaaatacaaaaattagctgggcatggtggcacctgtaatcccagctactcaggaggctgaggcaggagaattgctagaacctgggagacggaggttgcagtgagccgagattgtgccactgcactccagcctgagcaagactctgtctgaaaaaaatataataataataattatgattatatttaaaagatcaaatattaatttgtgattatattttctacaagggcatgcactatttaaaattgagcactcaaatctggtttgcacaactgcacagagaagcttgcaagactgccgaatatgtcctgacttgctactagtcttttgatagcctccttctttggcaaacatggctagtctgcatttgtactggaagccacttgggattcctctttaaacatcagtcattgttcaaaacccacttcgcacttctttctctctttatagatcatgttgcccccaaaatgaactgaacactcttatcttaatgctaatttgacagagaccacttctaatttattatcatcctgcttactcttatataaaattagtgtttgctatagttttttctccctttgaatacctcaaagttgactgacagtttttcctcaacgcagcttgcctctgataacatccagaaaaaatgaagaaaatatactgctttgtaaaatagaagagcttaacaagtacaaatttgtcacttttttcgggtgtttcgaaagagtgtaaacagtaaacattgctgtttatttcttgtgtttcagaagtaaggctatgtatttttatcgagctatttacaatttacatataagatgtaagtattttcatgaatcattttcatcagtggggtggatatacctatcatagcggatacggtcctattctgacttttagatcagaaatcactttcagttatttgtagcacacaccttaaagcctattaaagttctccccaccaaaatttgtattattataatcactggatgtcaacacctgtggctcaaacagtatccaaattttgtatattgttggaggattgctgatttaactgagagttgtagctagaaataaggtgagaaagaatatacaggtaatactaatccacctcaaactaagaagcaaaggatggtggatgggctatgttgatctagcgttgcaaaaacacttttggatgaagtgcccagaaatagccccagttcctttcactagaatcagctcgtcccaggtgaatgccggcagagcagggtgtgtgctccccaagaaagggcagtgaccgctttccaatgtctggcagttaggggcgatgagagtagttgcaattggcaagataaaggggaactttggaaaataaatatacttatgatagaggaggcaggagaaaaggtcaagggctgtacacatgtggaactgataatcatggtagcttggcttctatgaatgggtacatgttgacccttaagtgagcttagaaagcttgagaagtcagtatgcgtgaactgtttgaggcataagaaaggcaggattttaaaactttttttttaatttgtgcaaatttatgggatacatgagaaattttttacatgtatgtaatatgtagtgatcaagtcatggtattcaagggatctgtcaccccagtacaatatattcttattaagtatagtcatcctaccctgctatcaaacattgaatttattcctcctatcttactgtacgtttgtacctttagcctacttctccttagcctcccttcatccccagtcaccctccccagtctctgttgtctacttttccactctctacctccatgtgttcaaattttttacctcctacatatacgtgagaacatctgatttttgtatttttgtgtttggcttatttcatgtaagataatgatctccacttccatccatgtagctgcaaatgacataatttcattgtttttatggatgaattgtattccattgtgtagaagcaggcagaattgactctgatagtagtctagctggaagagaggctatagctacaaagaatcttgacttaccaaaacactagtaacatgtctgtgaaactgctgtagtctaactcatttactactatgttaatttggagcgtgaagttcatcagtggaatgggtactataatttgcaaagttcaagtgacaattctggtagataaagttttaaggagcagatggtcacaactgtcagtctcagaagtaatttggtaagtaaaatagtcatttatttggaagttttttggtaacctaattgtgatctaattgtcaccagttgggagtctaattccattttcatcactcatctgcagaaaggtgagagaaataagctattaattaatagccaatatttacgagctcttactatccaccataaagtatgctaagtgctttatgtgcattatacttaattatagtaactttctgaggtagttactattattatttccagctagttagtggaagaaccaggatttgaatccaggcaaactgactgcagagccctcacttttaacactacacataaaactgagtttatttaacagaaaacactgtcctttaacctgagattgtgtctacctttcaatactaaaatgtactttttatatgaaatggtggtgatagacgatgtcaggtttgattttcttttttttttttttttaagaaatctttaccttgcaaaactaaaactaaaacaacccaatgacagcactgctctccagtttaaagaaaacaaatgttcttttgctagttgtgaaatctaaatttgagaaccactgactagaaaagtgggactcttagtaatttttaaagttctttagagatttttcacctgatttattttctgatttcaacctccttgttttcattaaccttttccttaagtccacctcagccactcattcttcgattatacacaagactttgtttgccattaccagcaaccacaccactttggggatctcagatgtaagcatcttgctctcgcgctgcctcccatttttccttgcttactcctagcatttctcctgttaccaactccagcaacttggaccccactggaacctccagtataatttattctatcagttcccaatctttttgttctctctctcctctttccccagcttaacctccatggtctatcacatatatcctctttgtatacacctttagcagccttgctcctcatcttctgttgtcaaatccacaagtgtttctcagctacctgcctactctgtgccagtattctcgctgttaagcatggcttaagaaaaacacaaaaccacagtgtctgatctcactttaaatttatgaaccaaatctcaagtgagccctcagtatttcttggaacagatattcctagtattccttctgtatttccctagtccaatccatttattctcctattctctgagatgactagttcttcttctctatttggctcaacccccaagcaccacctcttccatctttaccagcagctgatgacctggaatctttacttcacggaggaaatagaggcaaacagaagagaacttcttcatcttcttcatcttcccaccacaagatgtatgattggttgaatgagagaaagactgtgatgtcctagaacttcagttgctcctatatccaatgtaattagcaacttaaattccaaaaccatatataaaaatcgatttttggccatttgagattatactctttactaccactttcctttctcttattataaccaagagttgttactatgtttgtgcctcatccaaataaaaagtaggtattttttagaaaatgattaacgggagcaattagtaaaacaagcagtaaaatacccggatacaggaaattgagccaggcttgctggtatgtgcttgtcccagctactcgggaggctgagttggaaggatcgcttgagcccaggagttccaggttatagtgagctgtgtcacaccactgaactctggcctgagtgacagagtgaaaccctgtctctaaaaaagtacttgacataggatattgagagaagaaatgctttggaactatgtttgattatacccttagcccaccttagttcttacttaagtaagttatagatgaaggagaaaagatgggaatcactttgaagattaaggcctcaaactttgtggaaaatggaggaaaaaatgttgaaaacagtcatgtgatagtttttaccttacacttttgatgggaaaattagataatagaattgagctatacgtatgttgactgcacattacattaatttaatcctgttatttacctcatattgctaacctttaaaattaagatttgaaaaaaaagagatgggtaaaaccaaaaaggtcaaaatttgtatgccagcttagatgaaatttgtatttatagaactgaataagaatctacaccttacctaatactgtgaattgcttatgtaaatacaacaaaggatggtccctcgatgacctgaatctcatatgctgagttcacttagtaacagcgtccgtctgctcagacacattttcccaactccccatgtgctttccaaacctttaccatgtttcccagtatcctctcttcatccctcattttgttgatgacctagttcctgcttcacatagtcaacagaacccaacaggaataacctcagctttcttcctccttgtccctttatttaactggtctcagaaggagaggtgtctttacaagctctccctctccattcctcctctgttgccaaagtttctgaaagtgtggtctccatatctgcttatgctacttagttttcttctaagtgaaaggtagggactcaaccccaaatgctctgaccctgttcgaagaccctgtggcctagagcggcatgtatttcctgatttctaaacctagtgccctttttccaggcctcatcctctatcactgcagcatttatctctgttgtcacattcttctgcttaaaacttttcacagcttttcacgtacccagggcaggcattcaaaaatattgaagcagtagttttgatgtcttttctgagctttcaccagtatttttaataggcactactgcctaaatgtcaaatgccttatagccaaaaacaagtaatgatttcctgtaatctccaaactgattcctcttcctcttgctatgtcttggtatccctgaggttaccatcattttatccatgtacccatgctagatgcctcaaggtcatccttgactcctcttccttctctggtttccatttggtttctaagctttgatgagtatctcccgcatcttcttttctttttctactatttcctatgactcttgcctctttctgtttattgtcttttgtctggattatttcagtaatatgttcaggagtttctaatttggattccatggatggacctcaaaggattaaagaactctctcaaatttgtatgcaaattttttgtgcatgtgcattttcctggggaggtccattagactgttctgtgggaaagagaggaatagaatgagagacaatgacaatttaaatcaggtccactgatttctcgttctatacctggcctttgttatttaggtcactaacctaaggcacttatctctgaggagtgaggtggcatgtaagatattaagaataaaacagcagcattagtcagtccagctgggcagtcagtccagcagccagagatcagaggctcctcaatatcagatccaggctttaatatcctagagaagctcaggagaaagctggggcatcagcaggagcagagggtgtcctcccgaggcccctggacccatttgttcctgtgcttccaaaggacttagagggatatgaaaacttaactggcaagaatccagagtgagttggtatccccagaaaaaggttcagaacattcccccagctagcctcccctcctttgcctgtttggtctctcgttctttctccactctgccaacacagttagcttttaaatacatatctcctggtgtgccttccgtgattgtcacttacacctaagggtgattagactaatcacccaaaaatgtggggttttaatcacctatgaaacaagttaaaaaatcatggtcatggtttcaaggcctgccagttaggagcctgccagcctcgtcgccaggcactgccctctcctcacttccagggctctggctacagcaggttactactggctgtttcgagagaacagtgtctgtgtccatatccctatgcctttgatcatgctagtctctctctttggggtggcatttcctctccattgcctgtgaacctcctactcattcttccaggcccacaatggatgttagctcttcacctgagtccattcttaattttctgccatcactctggcagaatcagtatctcttggctagagtccaaaaacatttcatacatatctctgataatgtcatattatattgtagatagcctatttttatttctgtctttcctactaagccagaaatgccctacagctagggactgtctttttcatgtttgtatccctaacagctacctttgcatctagtctaaacatgagcttagtacacttttgttgaatggaattagttataaagagtttttatgactcatttaaaattagagaccaatgcttacttaataagtcagaataggctgtaataataatagtaataataaagtcccatttccactgcttattcaagtaacagcttcctttgtggaagtacattttgaaagacttcacatgtcagtgtatatttttgatgtgctcatttgagatcctaaaagaattatagttctaaagcagactagagcttctattacattcctgttgaagttatattaaatatattctatcgtttcacatatctgtattatatataataagttgcatgggtaaacattttatctcttttaaacttcatggtaataatttgtgaattgtttattttataatatctgagtaaatttagttcaaaacacattaatttgagcattttctgtgtacagaagcatagttgcaaagttaagattcttgtgtttatgttgttttgttaaattcggaaagtctcagtcttgcaaatgtattttttttttaagtatttaaattagctcagctatgagaataagcacggtccataaattaagagcttcaaataattttttaaaatccttcatattctttgagttttgtaggaaaagaatcaacagtttacttattcagcctttcctgaagtccatagtaggtgctgggcatcatgctgggtgaatgagatagtacttgcatttgaatagtttacagtcttatagcgaagaagccatgtaaacagagaattgcaatataaaccttggaggagaggaaggaagactactttgagaaccgagattaggttgagaatggatgagtctgctgatcaatttatagataaagaagcagagaggtgaagtctttttttttttttttttttgatatgtgaaataggaacctaggttatctctaagaattcatagcagggggtagctcttgagaagaacagtgaagatctggataattaataaggagaattagagatgagctaacaaagacaagtaaagagtggcatgagaaagcagtgagcatagaactgaaactggatagcatgaaattctggaggtatcagtcagtagcacagtggtataattttctccagctgtgctatggagaaattatacacattgtggccaatgtgtagtgaataaagccatattgtattcagggactatggggtggttataacagaaatttacaaagaataaatagttaaaagtccttcaaagaaagcatggcttactagggaaggcagtatggttaagaggaagttgataaacttggagaaaatgtagaagtcaagaagttggagatcagaagggctggtgctttgtaggaactcagaaaatcttcattttcttctttctggatgtcctctccctatgaatgtttcaccaccaccacctgcctcagctacagtttatacatatgaatagtttcaaatcatgatggtaacagttggctcagagggcaagattaggagccagacttcaacgtgctgctaatccagcgtgtccctgtaacttagatgctggtagtgcttggtggtattggcctctaggagaagctcaaggcttctcctgttatctccctaccactcatacttggagggtgagtcaaaggccaaaaagcattttattgggcagtggttcttagggaagggatttactctgtgatgcagagggttaagactgtaagccatcaagtgtttcccctccctctccatgttcaaccaaaggcacagttcttattactttcaaggatttaaaaaggagtcttttctcagcataaaggaggaagtgaagaccaattttgacagcccaaagggtcttcctcctcagaatctaaaatttctaatagagttgtttgcatcttgtgattttacttgagtcatcaaatgtattgtactttttttcttaaagatatacttcttaatgctttcatttcagataaggacaaaccattttccatggcgacacactatttatattgcattttcagaaatttccctttttacccatacttcggagtgtgacactgaaacctgataatctattatttcacagagtgcttttttgggtgtaatataaagatattatataattttaataacctttgaggtacaagtggtttttggttacatggatgaattatatagtagtgaagtctgagattttagtgcaggacccattgtccaagtagtgtaaactgtacccaatattagttttttattcctcactcccctctcactttccccacttcttaattttctgccatcacaatgtgttgcccaggctggtttcatgccctcactttccccacttctgagtttccaaagtctattactctgtacacctttgtgtacccataacttacctccctcttgtaagtgaaaacatatggtatttgattttccattcttgagttacttcacttagaaaaatggcctccagctccatccatgttgtagcaaaagatgtgacttcgttctttgttatggctgaatagtattccatgggggtgtgtgtgtgtgtgtgtgtgtgtgtgtgtgtgtgtgtgtgtgtatacacatatatgatatataataattatatataatttatcgttatatgtaaaacaaagcaaattttttatttttatagagacagggtcacaaagtattgcccaggctggtttcatgctcctgggctcaagtgagccaccacacccagccaaaaataagtaatatttcccagttagacattttcagagtaaaaagtatttgttcaaaatcatagcatgaatggactcttccagagacctttaactggcagcatttccccctcaaactttagtacagttataggaattgtttctggatttttggctgtatattcttgttcatggctcatggacattaacatatgtgaatggcatcactgtgtttttcctaaagtgcatacgaagaagaaagaacactttcctttagagtcttacttagattctagttagctgatataagactgttttcttttccttttcaggttgtaaacatgttaaaggcatcctgttatatggacccccaggttgtggtaagactctcttggctcgacagattggcaagatgttgaatgcaagagagcccaaagtggtcaatgggccagaaatccttaacaaatatgtgggagaatcagaggctaacattcgcaaactttttgctgatgctgaagaggagcaaaggagggtaatgtgaacataagtgtgatttagtaaaagtttatcactcgctatacgatgaatgagacccagagttatggagacaaacttgttgctttgatttatattttgaagcaacttacaggtaaatttacctagtacctaggttatatatggcactgcaccagggactgtggaagatttacgtgatgagcagatgttgttgcccacatattcctataaacaaaggtaggtgattgtgtaagccagaggttttgcaaaaataggtcatgaatatattttcaggtgacacttttattccatattgcttccagagacttgtgctcatttatcctttggaagaaaaggggaaattaaatccataaatagacttatgaaatcgtattatgtaaggttcatatgcaaaaagctatcttacttaacactgagtcttgctcagttatagagtgacaggattgagttgtcagagctcaaaggaaagcttgatttgcgtctcagaaatgaaattatttaaaaatcaagctagaatttactaattctgatagttttacatgtcaacttgactaggacataaagtgcctaaatatttggtaaaacatttcggttgtgtctgtgaggatgtttctggatgaaattagcgtttgagttgatagactgaataaagcagattgccctccctaatgtgggcaggccccattcaatcagtttaaggcctgaacagaacaaaaaggcttactttcctgcaagtaagagggaatttcgacttgcctggttaccctgagttgggacattggtttggatgcacaccgaaacatcagctcttcctggcttggaggcctttgggctggaactaaataatgcgtattagctctcctgggtcaccaggttgctgacagcagatcttgggacttgtcagcctctgaaattgtagatttatcccaaggaattggctaaaacgattatggaggctgacatatatatgtgggtgtatatgcatacatacatattcatagagatttatcataaggaaaacacacacacacacacacacacacacgaacattctattggttctgtttgtctgttctgattaattatcctaatactaacatatttttttcattgacagtttaagaacaatgccatgagatttctggttctagcaatacagtagactaggtaaccagaaaaccttccttctataaacaccttcaaatgctaggtatacactgtaccccttaaatatgcacagttatgtgccaattaaacacaaaataaaacttttaaaagttctgggtaaaacataactgaaatcattttaaatgcataattgagctcttcagaaagaaaactggatctccaggaaattagagtcgtaagatacgggctgcagcttttggtttcataatgtatgggtttgggttttagtacccactagggaacagaacatgagtccttgaatccatttacagtgtggactaggaactggtaccttcaaaggggttgtgtctatgaaaagagtggactagaaaatatctgctgccaccacagggaaattaacaaaaaatatttaactgcctgggttctggaatggaagctgggaaatctcctatgggaattcttcttcttttttttttttttttgagatggagttttgctcttgttgcccaggctggagtgcaatggcgtgatctcggctcaccacaacctccgcctcccaggttcaagcaattctcctgcctcagcctccccagtagctgggattacaggcatgcaccaccacgcccagctaattttgtatttttactagagatggagtttctccatgttggtcaggctggtctcgagctcccagcctcaggtgatctgcccgccttggcctcccaaagtgctgagattataggcgtgacccaccatgcccggcctcccatgggaattgtaaaccatggatccttgttcatgctggtttagaatttgaatgaatgtatgctacctatgtggcttgaaacccgaagctgagaaattagttaaaaaaattattcaggtgcagtggctcatgcctgtagtctcagctacttggaaggctgagatggaagggtcactagaacccaggagttctaggctgcagtgagctctcattgtgccattgcactccaacctgggtgacagtgcaagaccctatgttaaggaagaaaaaaattagtcctgggctagtgatagcataagttgtcagatataagcaaaccccagggggtgctccaacaacctaggctgaaaggaatagaaaaagtagtcatgaaaatttaaaactcagcaaccaagtttaagataagacaacaaatttcagctgaagagagaagtggtaaacagaagaataaacctaaagaaatcacccagaatgtagcacagagagataaagggatggagaagatgaaagttgagatgagagagttaaaacaagaagtccagatagaatagtgtagaggcattattcaaaaagagaatgactaagaatattctagaattaataaagacataagtactcagattcaggtagcaccatgagcctatatgggataaatgaaaattaacttatttctagacttgttataggagaatgccaaagaaaaaaaatcttagtaacaaaagaaagacatggagatgacttacaaaggggtatccattatgttgatagcaaacttttccatgacagaaagagagaacaaaaaacagtagaataatatcttcagagagctaagtgaaaataactgtcaacttaaaagttaatacccagcttaattctcattcaggaatgagggtgaaataaagactttttttcttcaggcaaaggataatagaattaactagttgcagaagcttgttggaagattatgaagcaagatgtactgagactgaaggaagttgaacccagaaggaaacagtagagccaagaaacaatgatgagcaatgaaattggtgaaaatatagataaagtctgggagttctacttctagtagtggcaaattaggtcatttgagtcatgtgttccactgaagactaccagaaaagctcaacacaatatttaaacatgttttgcttgaaggtatcaaagaagaaaaatggaggcctagaacaaaggtcctcctggtatactgggtcactgttcctctcgagatattagccagttctgcaggaagctgctaaaacctaagcagcccttttgacaggctagtgggagtaatgggggcagagattagtgcccatggcccctaaggaggggacacctgatgaacataactcattttgagtcaagaccctgaagggctacaccataggagcaagggttaaccaggagtagacatactctcactgaggctgcagatcagctttgaatcatgtcagtccctaaaattagattgagggttcctaaattgctagtgcccctaggcatctggcagaattgtaaatccttcctggaagaaagtggtatcatgtaaggtcacaaattgtttctagtttgcaaatgcaatgtctggcttataatcaaaagcaactggaaacagatacacaaacaacatcaagaaaaagaaaagatggttcaaacagcctctagatattggaattctcagatacagacttttgaaataattatacttaccacattcaaggggataaaagacaagacagatttttggcagagaactggaaactaaaaataaacaaatataaattctagaactgagaaaatcagtaagtaaaattaactcaagtgaatgagtttaaatagcaggttagacacatctgaagagagaattagtgtactgaaagatataagatgaaaataaccagagacaaagaatgaaaggaattaagagagagtaagagagagagagagagagagagaataccgtttaaaggtctggtgcgtgtatttaaagttccagaaaggcaagagaaagaggatgaatcaaaatcaggatttgaagagaaaatggtttagaactttctaaaactgatggaaaacattagtccataaattgcagaaatgatatgaaccctgagcaggagaaataccaaagaactctacatatataggcattattgttaaattgctgaaaaccaaaaatgagaaaaatcttaaaaggagctagagagcaaaggaaaattaccttcaaataagcaacaactagctagtagctgtcttctcaatagaaatgatggaaacaaaaagtcaatcaaaggccatttttaaagagctgaaagaaaataactgtcaacttagaattttatatccagtaaatggatgaatgatcatagaaatatataatggaatacaaggcagtaatgaaaataaatagcctacagctatatacagttgtgaatctcacaaataaattattgagcaaaagaaaccagatttcaaaaaacacatactgtgtgattccatttatagagagcttacctaaagtatagtgtttaacaacacatgcttgggtggtaaaactataaaggaaaatgaattattaccataaaaatcagattgtggttacccatggggaaaggtcagggaggagtgcttgggaggggttgtgaggaggtgctcccaggatgctagcagtattctgtttcttatgattacgtaggcgttcattttgtgacagttcattgaggcatatattcacattttgtaacttttctctatgtgtgatgtattttgcaattaaaagttttaaaaataaattttaatagcattcactgagaaaaacaataatgatatgaatatttttaaaggatagaactaaaatatggaaaaaaacgtttgggaagtagattaaattcatgtaagctccttatattattggggaagatggtagggagtttgagaccagcctggtcaacatggtgtaaccccatctctactaaaaaaatacaaaaattagttgggcttggtggcgcacagctgtaatcccagctactcaggaggctgaggcaggagaattgcttgaacccgggaggcggagattgcagtgagccaagatcgtgccactggattccagcctgggtaacaaaagtgaaactccatgtcaaaaaaaaaaaaaagaagctaataatgttagttaacattaagtcaaatgtgcatgtgaaagttgtacattgtgcccaaacttttccaaagcatagggaggagctgggaaagaaacagtggaaattcaaatactttagaaggcaagaaagaaataacaagactcaaagacaatgtgatgataataaaaaggtaattttaaaaacaatttcatttatagcagaaatcagaatgtaaagtgcctaggattcgatctagcaggaaatgtgcaagacctttaaggagaaaattctaaacatttttgaaaatctttttttaagcagctaataaatggtaagatataacatgttcatgtatgggagaactgacaatgtcataaaaatgagttctgcccatcttggtctgtaagttgagtgtatttccagtgaagcctaataggaattttttaacatttgacaacttgattctaattttttttgaggcttgaagagttatgagaattttgaagaataatgaagatttacttttatcacatatcaagacttactagaaagcaatagtaattgaaacaatgttatatattcatgcaaaaacagaccaaggaaacaatagaacacaggaaggaagagcctgctctatgacaagtgatgatacagatcagaggggagtaataggctggctgtgccttaaacggagctgagataattgactacctatttggaaaaagataaaatgcaattcctacctcacagcatacaaaattgcaagtggatttacaaaaaaacaaaaacataaaagcctactaaaatttataggaggaaaacttatttagaagaaaaataggcaaaaatgttttaagatttgaggctagggaagaattgatacagaaagtaaatccattggaagtgttaatttggctacattaatataaagaaaattctgtatgacaaattacactgaatacaaatgtctcaaactgggagaagatatttgcagtgtatataatctacaaagaattggcatcctctataataaattctctataaaaagtcttgtataataagaaaaatataaataccacaatttaaaaaaactgtcgaaggatttaacacgtagttctcagagaaagaacacaattgaagaaaagcaaatgaaaagatattcaggaaaatgtataataaaagagggattatttcttaaacaacctggcaaaatttacaacagctggtaaaaccaagagtttgtggggttatggagaaacaaggtctcatatacattgctagttggagtataaactagaagaatataccaagtgggtagtatcttgcaaataaatttgacatcttacaaaaatgaaaatgcacaaaccccatgagttctacttcaagaccactacctatgataaacaacatgacatgtaccaggatgttgattgtcatgctatttgtaatagaggaaaaagaaacatcattactcttccttagtaggaaatggaatagcatacagatattaaaatgaatatgctgagcacagtggcccacgcctgtaatcccagcacttcaggatgccaaggcagaggatcatttgagcccaggagttgaagaccatcatgggcaacatagtgagaccccacctctacaaaaattaaaaattagccaggcatggtggcacattcctgtggtcccagccacttaggaggctgaggtgggatggtcacttgtgccggggaggtcaaggctgcagtgagctgtgatagtgccactgcactcccgcttgggcaacagaatgagaccctgtctcaaaaaaataaaatgaataatagatttacatagatcgacatgaataacactcagaaatataacatctcgtcttcaaaaaaaaaacctagtaagctgtactgaattaatctatcctaccatttaaaatttttgttgagggtaaaataatattaaatattccctttatagcaatcctcttagtgctttaagtctgcttgttgggtccttaattgtttcaattttatacaaggtcgtttcctttcctgctttccagcatttcattaagttcttgttcaggtctccagctagatcagtctcattggttctagcaggtgtgggtcttggtgggttggtgcaagtccattcactatttcaactcttcagaaagtcccggaaccagtcagttttgcagttcattcctaatactaagattgtttctgcttcacttatctttttaacttacctcagtgtaccaagaaaaacagtcatcaccatatactatctaggttgaataaactccgcttaaaaattattttagattattttccaaataatttacaaaatacaagaataaagagataaaaaactattaaaaattaaataagaacttaaatatataaataaaatttttatgccatgtttccctggtcttgaggtgttttggattttggtttttggaatatttgcatatacattaagatatcttggcgttgggactctggtctaaacatgaaatccatttatgttttgtatataccttgtacacacagcctgaaggtaattctgtacaatattttaaataattttgttactgaaacaaagtctgtgtacattgaaccatcagaaagctaaggcatcactatctcagccactagatgtggatggtctgtggttggttggcatcaccattgtttctgagtgtaaatttatatgcctgataaataatcgttttcatacatgtattgagacacaagtacttaacagtaaaaaatatgacacaccattaatacagtgaaaaaatagtgagtttagggtaactaagcagcacaatggcatcaccagaatacctggataagctgttaaacaacagcaacaccaaacagcaacagtttcagtcaccacctacgatgttgtggggggcttttgttttggtttggttttttgagatggggtctcactccatcgcctaggctggcatgcagtggcaccatcatggctcaccgcagcctcaaactcctgggctcaagccgtcctcctacctcagcctcccgagtagctgggactacaggtgtgcaccaccatacctggctaattttaaaaatctttttgtagagacaaggtctccctaggttgcccaggctggtctcaaactcctgggctcaagcgatcctcctgcctgagcctcccaaagtgctgaaatgacaggtgtgagctaccatgcccagctgatgttgtgttttgattaaaagattatcatacagtaaccccctgtgtgtggtgcacctttcagattttggaacattttggattttgaatttttggattagggatactcaacctgtataccccaaatgggcaggagcctctgaatgcagtaactgttcatcagctgtcctgcatgaacttacaaatactgattctaagtttcaaatacatctttgttggcttctaaattattattacttctggttcttcttgcacttacagcatcaaaacataatgctttaagaatttttttgagatctttggctcctaattttgttgaagagaggatgaccattatatgttccacagttgcaaaacatttttatttttagatttgtagatacctttcagaatgatcaattctgttttttatggtcaatccaattttttaatgtctacttcatctatttcttctggctatctctctgtaatacctgccttcagcatctgtctacttttaaactatatcaagaaaatttggtgcacaaatgaaataaaagatgaaagaatactgtcatgtgtccttttagcaaaatgggatggcctcatttcttgtcacaagatattccacaaagaagactttctattgaataagtaactgaatgaaaatgctttgtccttagattaaaagtatattattcactcattgattcttgagtttgagaaaatgtatgtagggcatcatcatctgaagacacatagactgagattttacttataatcatcaatttcagcatctttattagagtcctaagtgctcctatcttattctttgtgttcaacttctgactcatctaataattctaaaacagtttcctcagattttcttcgtcattctggctagagaacttacaaatgttaatgcttaatcgtattcaataaaatgtagaatgaggtcacaaaagatgttagctccagacttcttttatgccttcttgaaagataacacatatcttgcacaacacagtaagaaaactgaagagtgatgtcatagtgatacttgtttcactgtttctaagtaatttagtcattttttattatactttaagttctgggatacatgtgcagaacttgcaggtttgttacataggtatacacatgccatggtgactggctgcacccatcaacccgtcatctacattaggtatttctcctaatgctatccctcccctagcccccccacccactgacaggccccagtgtatgatgttcccctccctgtgaccatgtgttctcattgttcatttcccacttatgagtgagaacatgtggtgtttggttttctggtcctgtgttggtttgctgagaatgatggtttccagcttcatccatgtccctgccaaggacatgaactcatctgtttttatggctgcatggtattccatgtgccacgttttctttatctagtctatcgttgatgggcatttgggttggttccaagtctttgctattgtgaacagtgcctcaataaacatgtgtgcatgtgtctttatagtcgaatgattgtaatgggattgctgggtcaaatggtatttctggttctggatccttcaggaatcaccacactgttgaaacagcatggtactgttaccaaaacagatacatagaccaaaggaacagaacagaggcctcagaaataatgccacacatctacaaccatctgatctttgacaaacctgacaaaaacaagcaatggggaaaggattccctatttaataaatggtgttgggaaaactggctagccatatgcagaaaattatacaaaaattaactcaagatggtttaaagatttaaatgtaagacctaaaaccgtaaaaatcctaaaaaaaaccgtaggcaatacctttcaggacataggcatgggcaaagacttcattcttctattttcttattttaatcctttttaagcatagttgagaataattgatgagtaatgatgtaatttctagtgtgatgaaatagcataatgtgtcttagattcataaaaagatctagtagatccaaatggcaattgtaagatagaattttattctatttttttaaatattgggttttttgttttgtttgtttgctctttggaaaaaggaaaaaagtcatgagatatcaatttttataaatagtactacttaaaacagaaactcagaaactgagattgggtctaacggaccctaatgagatactgaggattaaacactaggcagaagtgagttaaaatgccatatggagaagcattttataacatctcagttgtgatagttaaccacatggctgcataggtaactttggtgctgtttttaaagttgcaagcaatttaaatattaaactactgatgataaaattgagttagcaaagaatttccagttcgatattaattatagccagccttttcagttatacctttctcacatccagaaatggcttgatgtactcagctaatgacctcatgcaggatatatatgtgtgttacataataaagaaaaacatcacttctgtaattttggacagtccacactgacggagatgaacacttgcatataggtcaaactagttaaatatagaacagccgcttttgaaagctgttgccagggctcaacagcgtcagctctgtttctatggagaaagactttgcagatgttaaaaacagagctagaagccaatgaatggaagaggattgtgctgtggaaatttaatttttttgataaagggtttattgatgaatcagctatattagtctgtgaacgttaatcttgacatcttctttacccaattcccaatttcttggaataagatcttgcttttatttaagtaacacacaatgtaaaatttgatgttattgtactgactaggtggggtaagggacctgatgacaggtaacaagattagtaaggttctgaaaaggtcagaattgtactgaattatgtttagaacagattgcctccgtgatcatttaatcaaacagtgttcgtattgtctttgtccttgtccacatacgtgatttttgaggttgggctgagaaggaaatcatgattccatcaacaacataaggcacattgacagtaaaactcatatattatagcagctttttgtttcatgctgtatagggcagacaaccttgaagaaaaaaaaaactttaaaaaataatgtaaaatttcacagtttttcagtcacaaacagaagtatccttgttgtcactgaagatgacaagaattaatatcctgctgtatagaagtactttggcaaagttaaggttgtagttccaattcctcatttccaattttttctccagatggaaagatgaacagtttttggtattgaatttttttttaggaagcaagttatttatcattagatatctattcagtaaatgcaatgatacagaaaaatgaagtttttttccctcagatttgaaattaggttttaaaatatggagggagaacaatttgtaagtaatgttcaggaacaaaaataaaacctaatgaaactttagaaactttgatggacatctgtcatcctacatacaattgcattaaagaatagaatttattattattttatctggtttattatgctgtaaaatgaatttttctctttttgtatgtagttttatgaaatttcatacatgtatagattcatggaaccactgtaaaaatcaggatgtagaacatttgcatcacccccaaaaactccttcatgcagtcccttactggtcaccctttctttttagtaaccctggtaactaccaatgtgttctccatccctgtagttttatcttttcaagaatgtcatataaatggcgtcatacactatgtaacctttggggactggctgtcttcagcataatgcctttgagattcatccaagttgttgcatgtgtcaaacatccctttttattgttgaatagtatttaattgtgtgggtgtactatcatttgtttatctcttgacccactgaaggccaattgggttgttttctagtttggggcaattatgagcagagctgctataaaccaagtagtggaatttttaggtcatatagcattttatctattttttatttaaaaatatatattcagggtttgtttttgacccagttgaatttccttcaggtcatttttggaactctttcttcctatgtctgatgtaacatttcatctttcatctttgtcatttttttattcccccttttcttcagattactataggtatattctggtattgtagcccagaatctgtcctgcttttatattcctccagcttaattatatgatccatcttcttacggtatctacggcttgctacaagactattctttactatttgcagaagacgttcagatgtatcttgctatccttttttattcagttgtgtatatcttgttctctatttggaggcctttccaaatagatgtcttgttaactctttaatcttatcatgctagaaacaaacaaacaaacaaaaaaaattcccttgtatcttttcccttctgcagcttccttatcatactacagggtaatttcttttcttcactgtcagtcttccaccctacatgcaagcaataatcaaatctagcatttgctgtttggtcatcaccactcctgtcaccaaaattctcattctgtttagattctgcttgcctcatttatgtaccattatttgtttctcactgaccttccaagtgcatactccttttcatcctaaagccaagaataaaatcattttatataaagagcattctactttgcagttcatttactgatgtcctctgtttcagtaggaaggcctaattctagatttcagtctgtcatgatagtactataacttctgcttctcacattaggtaaattttattatcccttttataggaccttgactgcctctgggccttctgttcagttgaacccacatgcttctaacttcttagctattagaccctctctttccccttttatatgtctttgttttggtacagcttctcatacccaaaagcaggtatacctgttagtaaggaggatacaagttgtatttgtaggtggtatgattgtctacctaggaaattcaaaagagtcagatttttttaaaaacttagatattataaataagagtaaagtagccatatataaaataaatacataaaaatatatttccttcatacttctatactgtttctgaaatataatagaaaaatcccatcacaattgccaccaaaaaacatagctaggaatctttatgaaggaatgaaggaatttaaacaacaaaaactataaaactttattgggaagctgggcccaatggctcacgcctgtaatcctagcactttgggaagccaaggtgggaggatcacttaagtctaggagttcaagaccagcctgggcaacatagtgagaccttatctctaaaaataaaaataaaaataaattttaaaactttactgagagacgtaaaagtgttgaataattggagaggcattattcttctaaaaaaccaaatatgctatacagattttagtatttcctaaacttagatatttaacctaatttcagtcagagcttgggtttttgtctgttctttatttttttatttttaattggtggaggttattccccctcataagaatgattctgatgttcatttggaaatacacatggttggaaatagccaagatagttatgaaaaagaagaatgtatagaggagaagagcttcttcaatgtactactgtaaagttatggagataaaaacatgaatgaatccattgagcagagtagacaggctggtaataacctagcatacatcaaagtccaaaccttggtatgatggcagctcagtcaacgaagaaaggagggataatttagggaacaatgctgggtcggttatttgaagaagaattagttggcttctcactttacttgtaccatacacaaaaataaaacaccagataaagaattatatgtaaagcaaaaatttaagaaaagaaaatatgtgaccatcagtgtctgtaatggggaacaattttaaggataaaactaatgaaaatatcataaaaataaaaattgtgctggctgtttagtagaaacagaaaacgccttccacttaccgaaaatataccataaataggctgggcacagtggctctcgcctgtaatctcagcactttgggaggccgaggtgggcaaatacctgaggtctggagtttgagaccagcctggccaacgtggtgaaaccctgtctctactaaaaatacaaaattagccagacttgatggtgcacgtctgtaatcccagatgtgagaggctgaggcacgagaatcgcttgaacctgggaggcggaggttgcatgagcagagatcataccactgcactccagcctgaacgacagagcgaaagtccatctcaaaaaaatatatatacttatatatatgcacacatgccataaagaaaagacaactggcaaactagaataaagtagttacaagtataataatggccctaatgtataaatcattttttaatcaataggaaaagctcttgaatttcaacagaaaagggtatagaagacatatcaaatactaataaaattaccaatggtaaaaacatgattttttaacagcaccagccccttcagtaattagataaatgtgatttaaaaacaacagaaagatactattgtccatctatcaaattgagaattacttttaaagtgtttctaatattcattacttgtgggaatataccaagataggcactatcaggtactgtgctgggattatagattgataaaacctttctggaaaagtgtttctactttttcaagtgttcctatttcaagggccttaaaatacttaacacaccttttaacctaacaatttgcctttagcaagtattcatctatattgtcaagcgtttaagtataaaagtgttcattgtaggctgggtacagtggctcacatttgtaatcgcagcactttgggaggttgaggcaggaggatcacttgagtcctggagttcaagaccagcctgagcaacatggcaaaaccccatctctacaaaaaaaaataaaatattttccaggcgtggtagcacgcatctgtagtcccagccactcgggaggctgaggtgggggattgcttgagcccaggagtttgaggctgcagtgagctttgatcgcaccactgcactccagcctgggcaacagagtgagatcctgtctctacaaagaatgaaaaaagaaaatgtttattgcagcaacatatataatactaaaaacttagaaataattaaatatctaacagtaaggaatgaatatggagtaggagagttaaactgtgaaaccattcatatgattaaatattatagagctattaaaaatcatatcatcggccaggcgcggtggctcactcctgtaatcccagcactttgggagggcaaggcaggcggatcacaaggtcaggagatcgagaccatcctggctaacacggtgaaacccatctctactaaaaaaaaaatacaaaaaaaaaattagccgggcatggtggtgggcgcctgtagtcccagctactcgggagtctgaggcaggagaatggcgtgaacccgggaggcggagcttgcagtgagccaagatcacgccactgcactccagcctgggcaacagagtgagactccgtctcaaaaaaaaaaaaaatatatatatatatatattgtatagggatgggaaagggtttaaaataatacctgtactgaaaaacaggatgcaaggtattacatagctccattttggctgagtttgagatgattgtgatttctttattttttgctattttcccacattttttataattatatattttgcaattggaagcaaaaataaccattgaaaatcgttttcaaagaataatattcaagagaatacaaggtgcagtaagttcttaatatttagttaaaatatagaaatctgtggaccattaacagcacttatctttaggtaatgtaatgatgttttatagatgggtctttattgatgggatgtcactatgttgcccaggctggtcttgaactcctggcctgaagcagtcttcccacctctgctttccaagtagctgggattacaggcacaagccatggcaaatgtagtatattttaatttatgtttttagtgatggaatctcactgtgttgcccaggctggactccagctcctgggctcaaggattcctccagcctcagcctccagagtagctgggactataggcacgtaccactctgcccagctttatttttacactttatttgttttacaacttttgctctgttaacaaatctactactcctttaaaaagttaaaaaacattctcttattaaaacaaagattaggctgggcatggtggctcacgcctgtaatcccagcactttgggaggctgcgctgagtgaatcacctgaggtcaggagttcgagaccagcctggcaaacatggtgaaaccccgtctctactaaaaatacaaaaattagccaggagtggtagcacatgcctacaatcccagctactcaggaagctgagacaggagaatcacttgaacccgggaggcagaggttgcagtgagctaagattgcgtcattgcactccagcctgggcagcagagcaagacttcatctcaaacaaacaaacaaacaaaacaacgattatatccttatcggagatttaatggatactaaccatatttaatcctcagtctcattatgctcatttaatttttattatccgtatgttgtcatatttaggttatgttcattttttaccagttttgttaatccctagtattttttgtttttgagacggagtctcactctgtcgcccaggctggagtgcagtggtgcagtctcggctcactgcaacctctgcctcctgggttcaggtgattttcctgcctcagcctccagagtagctgggattacaggcacctgccaccacacccagctaatttttgtatttttagtagagatagggtttcaccatgttggccaggctggtctcgaactcctgacctaagttgatccatcctcctctgcctcccaaagtgctgggattacaggcaggagccaccgcacccggccgtgttttttgtttataaaagaaaaaatttccagagtgcactttactccctgataggagactaaattacttaaatataaattttagaaggtacgtgttaaattaacctaatgaattagtagcattcagaagtgtttgtatctgttaaagattcaaaatatacaaactaatttcttttaatggtgattctatttctagtaaactaaggcagaaatcattatgcagaagaaacagcaccctgttaaccatgttctttttataaaccgtctctgttctcactttattgttaggaaggcgtaatctgttttcatgtaatataagtacatgtgagtcatgttgagtttcttcactcatttgtccaattcccagtcaacctgtaggtggagttaacctttagttacataatataacgaaacaaacattaaacctactgcttctgggacagtcttctcaccaaaactcagggaaaatgggagggtgttgccactgactgacttaatgaaagtatctgacaaatgtaaggtctttcaaatagtgagataagaaatgtatataaattatttgatcgactacttactttctatctatacacacacactatcagtatataatgtgtattttcattttatagctattaaatatgaggttctagaatgagttttcagtttgcagaattctgagaatctagttccaacacctttgagaggacaacaaccacaattgcacttgccatatttattagtcaaaatgaagtgaagtcaatctgttgaaagctttgttttgtttttctgattagtttgtttaataagacattcaaattatgatctttaatataatttcttcccctaatagcttggtgctaacagtggtttgcacatcatcatctttgatgaaattgatgccatctgcaagcagagagggagcatggctggtagcacgggagttcatgacactgttgtcaaccagttgctgtccaaaattgatggcgtggagcagctaaacaacatcctagtcattggtatgtttactttttaaaaaagtactattcattcaaaaacgttagccataagttctgaattaagatgtgtgtaggttgtgattaaactgttttgccagtgtttccaaattagaatccagtgatattgaagaatctattgtaatgcctaggcttaataggaaaaataaaagatggatttcagtcacttgtaggtttaagcttatagctcacccacaggtgaaaaagatgtaggttgaagcttatagctcacccaaaaatgaaaaatacacatgaaacaatggaatgcagtggttttcaaactgggtcttgcaggccttcgggggtcctcagaggtgctttcagggtcagtgagggccagggagtgcgtttcagatcctacatcactattataacttcctcttttagctgttttatgtactgaggtgcttctgaagatgacttctgggggaaaaaaaaaaaaaacaccctgctgttttatgaagtctgaaaaccactggcctgtaaaaaagagaaggaactttggagtcagagagatcgtgtcacattgcccctctgtcactttgacagattatttaccctttgaatcttaaattttctttttaaatactggaagttttcataacatttatattccattggcttatacagtagtgaaatagtaaagcaaagtctccttagcttgttagggaaattactattcttacatatactaaaaggacatttgattttatttttgaactctgatcatttgttgttttgttttaacatctgtgttcaggaatgaccaatagaccagatctgatagatgaggctcttcttagacctggaagactggaagttaaaatggagataggtaaggagatctgtcactgattgggtgtgtggtggggggagtggaggcatttagagttcattaacaggaacaatgtcatatggtgtagtattttttagaaaaggtttatatcatgagaagtagatgtttacatgcttgagtacctataaggaaaacattaggatcataataatctcctctaggctgggcgcagtggctcacacctgtaatcccagcactttgggaggctgaggcaggtggatcacttgaggccagttgttcgagaccagcctggccaagatggtgaaaccccttctctactaaaaatacaaaaaacttagccgagtgtggtggtgtgcacctgtaattccagctactcggaaggctgagataggagaatcgcctgaatccaggaggcagaggttgcagtgagctgagatcgtaccactgcactccagcctgggaaacagagcgagactctgtctcaaaataatagtaataataataatgataatctcctctgatggtgctttcgagactaggaaaatgcctattttatttttaatttcatcaggcttgccagatgagaaaggccgactacagattcttcacatccacacagcaagaatgagagggcatcagttactctctgctgatgtagacattaaagaactggccgtggagaccaagaatttcagtggtgctgaattggagggtctggtgcgagcagcccagtccactgctatgaatagacacataaaggtcaggaaaatcagctaaacagattataaacattatgccagtattctttctctttcctttcaagcatatcaaggggtagggaaatgctgacttttggtggagaagagatggtaaaaggaataagaattaattgtcaactgctaaatcttcagagtagcaggaaggaagataatgtttgcatctgccctgtagtaaccactgactcatctaccttaggtcatcaccatctgacacagacacgtaaagtgaaaattttgaagaagtgtttttaaatctttgtattgtattaaaagttgtaatatggccaggcatggtggctcatgcctgtaatcccagcactttgggaggctgaggcgggcggatcacaaggtcaggagatcgagaccatcctggctaacacggtgaaaccccgtctccactaaaaatacaaaaaattagccgggcatggtggcgggcacctgtagtcccggctactcgggaggctgaggcaagagaatggtgtgaacccaggaggcagagcttgaagtgagctgagattgcgccactgcactccagcctgggtgacagagcgagattccgtctccaaaaaaaaaaaaaaagttgtaatatgtcagaggaagtgggagtttccacgtactagaattttgggggctgctttattcagcaaatatattgaatagttgatgtgttcaagctattgggctggagacataaagataattgtgaactcttccctcaaggagttcagagtcaggaaaatggacatattttcaaattagtacaataatattgtagttaccatggtagaaatacgtactaggatacttttattttgataaagtgctcttgatcttccatctcttctctcctttaggttttagttaccacctgtagacagatttactgaacatatctgtctcctactttcagatttgtactaaataccctcacctagatgttttatcaggtctcagatttaatattgcaaaaccaaatttattgtcttttttactactttcctttctgctcgcatttccctgtttatcccaatttcccaggcttaaaacatcaggattatctttgattcctggcactctactgtgccctaggtcaagtcacttgccaaattttttcagttctgtcttggcagtgccttttagttctcactgccactacccaccttctctttgattaaccttcctgtatcatatcattcaaccattcagacactttcagtgattccccatcatttacaaaacaaagtacaggcttcttttgggtcttttgggtcctctagatctgaccctaactggcctttccaaatgtgctcctgattattctccacatacttcagccaaacttaaataatcaccggtcatcagacattaatttatttttcaacatctctgctttggttttgttttttttgcatcactgaggatcttcatcctctacgtttacctgtcttttcaaaacctggctcatatgctaccactgtcctcacaccttttcacattttccctttcaagaatgttatacccgtttccttcttgaaatagtaatgtatcatttatggtactgtcagttgactttggttcacagtagatttattcggcatctactgcatgctagaccctgtgctaggagttaataccccgactgcaaagaagtaaagtacctaccattaagctgccctcagtctaaccctccacgtgcagtaacagaaagtacatgcaaggcaagagagtgaactcatgtcagatatggtcaacttgtggggtgagagaaaccttcatatgcatgtctgttggtagagcagggccttttaggtagagggaacaacatatgcaaagaagcagagacacagaatagcatagtgcgttggagtagtttagtattgcttcagcatggaagttaggggagggatggtagagagattgtgggggataagtcaggagactaaagtagggatggagcacaaagagccttttatactctgctaagaagtatggactttttttctgtgagtagtgctaagccattgagttttaagaatagcagtgacatagtgttaaaacataagatcactctggcagctctgtcgagtggagtagttagaggagtggagttggcgacacaggacaagagggggagcttttataacagttcaggcaagaaataaaagcctgaacagttaggttgagtatgtagatatttgggtatatcctatcactggttctagaccaggaatccagccaactaccagtttttataaataaagggcttttttggaacagtacacattaatttgtgtactgtctatggctgcctgcatgctacagtggcagagttgagtatttgcaataggggctgcatggcccacaaagcctattttagtgcttttattttaggtactatctgccactttacagaagtttgctggcccttgttctagactttaaatccttatcttattcacctcagagtctcccatagtaccccagatagatctaaataatgagcacatggtaggtgtccagtaaattatttttctttttttttttttgaaacagagtcttactctgtcgcccaggctggagtgcagtggcacagtcttcgctcactgcaacctctgcctcctgggttcaagtgattctcctgcctcagcctcccaagtagctgggactacaggcatgtgccaccacgcccagctaattttttgtatctttagtagagatgggttttcaccatgttggccaggctggtctcaaacccctgacctcgtgatccgcccgcctcagcctcccaaaatgttgggattacaggtgtgagccaccatgcccagccaatattttttaaatgagtaaacttacgtaactattctgaatcacgctctatccataagtcataatttccctacataatagaggtggatttgttctagctcaagaatgccaaaggtttggatggtgtgggaatattgtattgggtctttatataatggatccattcagggactatgtttttattcttccttgtttgtttgttttgagacggagtctcactctgtcgcccaggctggagtgcagtggtgcaatctcggctcactgcaagctccaccttccaggttcagccattctcctgcctcagcctcccaagtagctgggactacaggcacccaccatcacgcctggctaagtttttgtatttttagttgagatgggatcaccgtgttagccaggatggtctcgatctcctgacctcgtgatccgcctgcctcggcctcccaaagttttgggattacaggcgtgagccaccatgcccggccatgctatactgttttaataagaagagatggcaacttcaagaaaaatgatgtaaacagtgtgaaaactggtccctaccatactgatctttcatctcagaccacatgggtgcatcttgatgtaatccacagtaactagtttactagttgtcatatttttcatatgtgttggccatggaatttttctcttatttagtcatctgtcattttaactacaataatcctatcccaaaatttcactttaagccgttgtctcagtaagaaacatgctttcttcaagcatatattgggtttatctacatatgaggcaatgagggatggtgggaagatcgcagatatcgtagtcagaaggtgtggttatgcattatatttcttccacctttttgtttctgacctgtcaaggggagacactacctatctaatcagatttttatgagaatgaaagcaaatactttatataaaagtgccttgtaaactctataaatgctagttatctccatttttttaattggctgatttgagaggatatcagtacttttcaatatatgaatttctgatttttattgactctttgtagttacacattttctaattgtaaagctaaaatgtttgtcacccttgtacataatatattatccttctgatttgcaagtaagcagtagtgcaaatagttcatgtttccatcacttttttccacatgatagaattatctgtaagcttcaggtgatatgtattgacttgcgatcattgctccttgtaccaaacagctcctaacttttcaccatatcaatggaataactatgtaggcactttagggatgagaaagctatgtaagacactaaccttacccccaaaaagaaatattactaacatttcatcttctgcattttaaaaaatctgcattgtcagaaggtctttaaagactatttttccaatgactcgtccttggctaaacaaaagaagtacagttttagtcttccattgctatagatgtttgtagctttaatagtgattgatgaataaatatttaaattgaaacttataaagttgttactgaactttaaaacattcaaaacgtacaagtgttatgatgttctttctttgtattttaaaaatccattattggtgttattttgcttccttttcaaaagattgaggcctaaagaaagatttagtcaggtggactaaacaggtctttcctgttaaactgttttttcaggttttctgagacaagtggaaaatctggtcagaaacacctgttgttcatgtcatttatacttgaacctatgattgcggtcaactaaaattcatgtgacatttggttgtttttatcttgaaaggaatttctgcttcaggttgagaagattcataacccaaattttttctctaatctgttgtgaggaaataaactgaggacacacacacacacacacacacacactttctctcacatacactttccacctgagtcaaagctctaagttatgtttacagaatttcataaaattatttcttatttttttgcagaatttttgattgattaaggtcattctacccttaatttaagaggaatgataagaactttgaaaggtcagatttaaaaggttatgaaatttaagggtgaccacttgatatttgctagtgttgaaatacaagtttattagtttctgcaggtataagctgaaagatgctgcctcttctatattgattagctgttataaataaaatgcaggaaaaatgttgctaattcaaacaaatgagaaaaggttttctgaaaaagtaaaaattcagaattatagactttttaaaattttacaaattttgataaaatgctaaaagtcagctaagagcagtccttagaaaatttattttaatgagcaggtaggaataattgacaattggaatattgatggcttacaattatgtaacttacagaattccttatgtgcctgaaaacagtttgttttgaaatacttcttccccacacccatcttaattcacttttaagaaaggactcagcaattaattgggtgagtcttttcttaataattagcaaaatgacaagttttataccagcttcagtcctaaaatctatcgtattttttggcaaattttgaaagatgggcaagatttttctttcatactgctgtatgtatctatcatttgaattcggttttactgtaagagaatcagaatgcaaaatattatggtaaaaacctaggcctgtgtaggaaagaggtgtttaaagtgaggctggtagctttgttgagattttaatgtttcggtcagagctcttgtcttccctttggcctgagagtttgtatcttgtagaatcctttcagatgtatcaaaaagtttgaatcagagttaaaacttttatataagggtatctaggaaggaagtcctgtatctgccttttataacttatggaaacccccaggtttgtataagtataaaatgagataatgtgatatggtgaaatgagatagtgtgtatgaacatactttataaactataaagaactgtagacatttgtatattattaattatcataattctttcacggatatgcttgtttcctgtgacaccatttttctttttttcttttttttttttttggagatggagttttcttcttgttgcctaggctagagtgcaatggcgtgatctcggctcaccacaacctccgcctctcgagttcaagcgattcccctgcctcagcctccagagtagctgggattacaggtgtccaccaccatgcctggctaattttgtatttttagtagagacagggtttcgccatgtaggtcaggctggtctcgaactcccgacctcaggtgatccgcctgcctcggcctcccaaagtgctgggattataggtgtgagccaccgtgccaggcccatttttctttttttaaacttagaaatgccaaataaatgcgattaatatttatcaaacctcatatgtgccaatataagccctattaataatttaaatgtttatgtttttttgtttgtttgtttttgtttttgagacggagtctcactctgtcgcccaggctggagtgcagtggcgccatcacaactcactgcaagctctgcctcccgggttcacgccattctcctgcctcagcctcctgagtacctggggctacaggtgtctgccaccacgcctggctacttttttgtatttttagtaaagacagggtttcactgtgttagccagtatggtctcgatctcctgacctggtgatcctattgcctcagcctcccaaagtgctgggattacaggcgtgagccaccatgcccagcccaataatttaaatgttaattgttctattgaagtaaaatatttgtctctttgttactttttactttatttttaaaagtatagaagttatagatgatggctttctttttgtaaaagattcaagaatgtcaaagcatatagggaaaaatgagaaaggccatctctaacaccactttcctttccctctccagagttagccaaaatttgggatatatctttgaagtttgttttctttatataatatttacattcatatacgtatgtgcttttttaaaaaaatgaacattaatggaattatactgcagtttacatttttcacttgcaaatattccttggatagctttctgtgtcagtgtatgtaagtccccttcattattttggacaaatgcagagtattctagaatattgccacataatggaaaatataagatccatgaacacagggaccttttctgttttatttactgctatgactccagttcctcagatagtgcttggtgtctggtaggtattcagtaaatagaattaatgaataatttatttaacatatggattatttctggttgtggctgttgaaaaaatactgttgtgaaaatgcttacttgcctccctgtgcacacaaggaatcattttctagggtagccatccaaatgtcttttcaaagacatggtttcattgtcttctagtttctagtgttgccagtgagagttatcataccaatctcgttctggtttctttgcaggaaacctgttttgtccctcagaaaggttctaggactttctcttcacctttggtgctctgaaagtttacagcagtgggtctggacagatgtgtgcttcttttcatttatcccgatcatcactcactgaaccctttaaactgcagaggcacacctttcttcagctataggaaatttttttctcttctgtcttttattgtttcttctctatgactctttctgttctctccttctgagactcctgttagatcacagttaaaacttatggatatttctttcatgctttgtagcctttctgtctcactttctgtcattttgtgggatttggggcggaagggaagataaataactgtgttctgtttgccatcttcacccagcttcctgccatagttctttttatcccacaaggatgacttttttttatatctgtcacttcatttgtctcacagtctcttcctaaaaaaaatatgactcatatttcataataattgatggaaggttgatatttatttaacatgcgtttgttttatagtcagctttttttgaaaatgctttttttttcaaagccatgataccaatttaaaaattaggctgtgttgttttgtgctattggtagtgagcccagtcgctttaaaacacgtgttggtatcttaatcactcatctggtccaggcagctccaagtgctgataaaggccttgatgcttctccagatgtctaaatgctagctccaggtgcagtaagcagactatttggagctggcacatagattctgaagcacaatgtattaatacaaatgaaagttttaggttcttggtctcctagagtaatggttcttaagcctggttcagtaccagaatcacctgtggtacttggtaaaactataaagaccctctaataggcctgttaaatcaaaatcccgtggggaatgggactgagcgcctgtatatctctgaaggctctggaggttattctgatatgcagccaagtatggctgtgttttcatttctgtatatattttctttttgtatggatttttcactgttcttactctctgtatgtattttttcttactcatgcctcatgagttaaaatggctatacagtgtcccttggtacagatgtgttctaatttacataactgatcccctcttggtagacattattaatatgcttcccatcttttttcataacaagttactttagtagatatacttgtacatataactttgtacacatttgtgaatatatttaggggataaattactagaagtggacttgttcagaggatatatatatttgtgaatttgagagatgtgttttctttgattccaatttttaaaattgttttaaaatgcccataaaattgtccgggcgtggtggctcacgcctgtaatcccagcactttgagaggccgaggcgggtggtcacaaggtcaggagatcaagaccatcctagctaatatggtgaaaccctgtctctagtaaaaatacaaaaaattagccgggcgtggtggtgggcacctgtagtcccagctactcgggaggctgaggcaggagaatggcatgaacctgggaggtggagcttgcagcgtccgagatcgcgccactgcactccagcctgggggacagagtgagactccgtctcaaaaaaaaaaaaaaaaaaaaaaaacaaaaaacagaaaaccataaaatttaccgtgtaaccattttaaatgtacaattcagtggcattaaatacattcttaatgttgtgcaaccatcactaccattcatctccagacctcttttcatcttgtaaaactaaaactccatacccataaacagtaactccccattccttcctctccctatcccctggcagccaccattttactttctgtctcttggatatcagctactccaggaacctcatataagtggattgtacagtatttgcttatttaacttagcatatggtcctcaaggttcgtcatgttgcaggatatcagaattttctttctttttaatgctgaataatattccattgtatgtacgtaacacattttgtttatccattcctctgtcaatggtcatatggatttcttccacattttagctattgtgggtaatgctgtcatgaacaaggctgtacagatatctcttcaagaccctgttttcagttctttgggggtatatacccagaagtggaattgctggatcatatgataattctatttttaattttatgaggaaccaccatatttttgttttccacagtgactcaaccattttacttatgttcccaccaacagtgcataagggttctgatttctccgcatcctcaccaacacttcttattttctgcatttttgtggtagtagccatcctaatgagtatgaagtgaaatctctttgtagtttggatttgcatttccctaatgattagtgaggttgaacatcttttcatgtgcttatttaaggccatttgtatatcttctttggagaaatgtttgtttaagttctttgcccattttttatttagttttttgttgttcaattttggcagttctctatgtattctggatattaatcccttatcacatatatggtttgcaaatatttcagatttttttatgtgtgaaaatatgcttttaaatcctcaagagttacgttcttaaactgaatatattcttaactattcttaaatcttggaagtccttacattttgtttttatctcttcttaggccagtactaaagtggaagtggacatggagaaagcagaaagcctgcaagtgacgagaggagacttccttgcttctttggagaatgatatcaaaccagtgagtatgcccattgagtgatatataggccaaaaagtaatgataataataactcaggcgaaaagtaagtgccatttactcagtattatggaaggttatagcatatgcagtttcataaaatgagaaaattttagtattggaaatgttcagtatgagaaacatctgtacaataatcctagtggctggtgatattatttactgaaatattttcatgataggaagcttaccatcttgtaaggcaggccattcaattttgagactttccagttattgttttactttatattgaactagaactaattttcttattggttcttatacaatcccaagctacagaaacctaacttcagtccatcttccatatgtcagttattaggatatttaaaattaactctcatatcctcctctgtctctctctctctctctctttctcttcctttcctcagcctcttccaaggcatccctttttcttgctcagtacatttagtttctctgactactatagtttctaagacttaaaaagtgtcagttttcttaaaacgcactcaaaatggtcatagttggagctttagaatacagtttaaggttattaacccattttcctataaaacaactactaacatttgagtaacttttgtttagagtcctgtgttaatacaaaaacaaattgtagaaagtcccagttcttaaagaagtgtgtgcttttctttcttaaatggacctcaggtccattaagattaatcttaatctttatgacacactgttattagtctgtattttcatggcatgtaaaataacatatggtatatgtagttttctgggacttgctatttattaaatattttattaccaagagtcatctatatcagggatccccaaccctcagtactggtccatggcccgttaggaactgggccacacagcaggaggtgagcagcaagtgagtgagcctcatctgtatttacagccactccctattgctcgtgttaccacctgagctccacctcctgtcagatctgtggtgacattagattctcatatgagtatgaaccctattgtgaactgcatatctgagggatctagattgcacactccttatgagaatctaatgcctgatgatctgtcactgtctcccatcacccccagatgggaccatatagttgcaggaaaacaagctcagggctcccactgatgctacattatggtgagttgtataattagttcattatatattacaatgtaataataatagaaataaagtgcacaataaatgtaatgtgcttgggctgggcatggtggctcgtgtctgtaatcctagcactttgggaggctgaggcgggcggatcacgaggtcaggagttcgagaccagcctgaccaacatggtgaaaccccatctctactaaaaatacaaaaattagctggatgtagtggtacgtgcctgtaatcccagctactcacgaggctgaggcaggagaatcgcttgaacccaggaggcagaggttgcagtgagccaagatcgcaccactgcactccagcctgggtgacagaacgagactctgtctcaaaaaaaaaaaaatgtaacgcacttgaaacatcccgaaaccacctcctcccccaatggaaaaattatcttctataaaactggtccccgatgccacaaaggttggggactgctgatgtatatgatttcttgtagctagacatcattcattttcatgctgaatagcattccattgtgtgagtaccacaatttatctattttcctgtcaattgtgaatgttaccagtattttgttattaaaaaaagatttgtcgtaagaattcttgaatgaatttctcttatttaggaataaaattattaggttgttggatatatgaatgtcccgctttaaaaaaacatttcccagtggttgaaccaacactgcccccaatactgtgaaacatatcctcttgttctgtatcctctccaacacttggtattatcagatttattttttatttatttattttttttgagatggagtctcactctgtcgcccaggttggagtgcagtggtgtgatctcagctcactgcaacctccatctcccgggttcaagcaattatcctgcctcagcctcccgagtagctgggattacaggtgcttgccaccatgcttggccgatttttgtatttttagtagagacggggtttcaccatgttggctaggctggtctcgaactcctgacctcaggtgatctgcctgcctcggctttccaaagtactgggattacaggcgtgagccactgcacccagcctcagatttaatttttgccattcagttaggtgtaaaatgagatctcatttcagtcttgatttgcattttagttattagagaacttaagcatttctccatatgttaattgaccatatgcatgtattgtgtgaaatagtgtccaagtcttttgcctgtttttctgttgtactgcttatttgattgatacaagttctttatatactctttttttctcaattttgtattgtgttaaaatacatataaagtttaccattgtaatcattttcaaatgtatagttcagtggtattaagtatattcataatgttgtataatcatcaccaccatccatctctaaaactcttttcttcttcttgaactgaaactctatacccattaaataataactcttttttccctcccctacaacacctggcagccaccattctactgtccatctttatgaatttcagtaatcttaagtacccatgtaagtggaatcatagtatttgtctttttgtaactagcttatttgacgtagcataatgtcctcaagggtcaaccatcttgcagcatgtcagaattttcttcctttttaaggctggataatactccattatatgggccaggcgtggtggctcttgcctgtaatcccagcacttttggagattgaggtgggtgggtcacctgaagtcaggagttcaaaactagcctggccaacatagtgaaaccccatctctactaaaaaatacaaaaattagccaggagtggtggcacacacctgtaatcccagctactcgggaggctgagacatgagaatcatttggatccgggaggtggaggttgcagtgagccgagattgtgccactgcacgccagcctggtgacagagcaagaccctgtctcaaaaaaaaaaaaaaaaaaaatccatgatatgtacataccacatgttgttatccattcctctgtcaatggcagccaggcttctgccacgttttggctattttgagtaatgctgtcattagcatggctgtacagatatctcttcaagaccctgtttttagttctttcgggtatatactcagaagtggaattgctggatcatatagtaattctatttttaattttttgagggaccaccataccgttttccacggtggctgcaccattttacattcccaccagtggtgcacaaaaattctgacttctccacatgctcaccaacaaattattttctgtttttttggtagtagccatcctaatgaatatgaagtgacatctcattctagttttgatttgtattttcgtaatgattagtggtgataagtatcttttcatatgcttatcaaccatttgttacatatccttttttttttttttttttttgagacagtcttgctctgtcacccaggctggagtgcagtggcacaatctcggctcactgcaacctctgcctcccaggtttaagtgattctcctgcctcagcctccccagtagctgggattgtaggcacccatcaccatgcccggctaatttttttgtatttttagtggagacagggtttcaccatgttggccaggctggtttcaaactcctgacctcaagcgatccacctacctcagcctcccagtgtgctaggattatgggcatgagccactgcacttggccaccatttattttatatatatatatatatatttttttttttttttttttttgagactgagtcttgctctgttgccaggctggagtgcagtggcgcaattttggcttactgcaacctccgcctcctgggttcaagtgattctcctgcctcagcttcctgagtagctaggactgcaggcttgcgccaccatgcccgactaatttttgtatttttagtagagacgaggtttcactttgttggccaggatggtctcaatctcctgacctcgtgatccacccaccttggcctcccaaagtgctgggattacaggcatgagccactgcacctggcctgttatatattcttaacaataattatttgttccaagtatctcctttaaagacaaaagccaatttggttagccctgtctttttattactattgtgacttttaaatataaaataatcattttcaaaagtaactccaagatttttttaacaacaagtaatttggccatgaggaagtgacaactaaaaacttaattttatttattccaagggtctggaggataaaaaaaaaatgaaattatgggatatgtaaggaagatatacacgttatatatcttgggagagtcactgttttatggttcaggcatcttaaagcttctgctgtgaggcttggagtatataactggaaaaattaaagacaaaagccagcctataatttttttttttttttaaatgagatggagtcttgctgtgtctcccaggctggagtgcagtggcgtgatctcggctcactgcaacctccgcctcccgggttcaagcaattctcctacctcagcctcccaagtagctgggattacaggcacacaccaccacacccagctaatttttgtatttttagtatagatggggtttcaccacgttggccaggttggtctggaactccatacctcaggtgatccacccgcctcagcctcccaaagtgctgggattataggcttgagtcactgcgcccggccatgaaaatttcttagaacagccatttagccagtttggattagtttcatcattactttttacactgctactgaatttgccatatctaggccaaagaatgagaaccttcctctgtattcaggaatcaaaggaccagtatatgcaaagagactacgtaaaaagtggtctgaaaaattattttgtggcaaagtaatagagatatgagatcactggatactgtttcaaagacagtattacaaaaacagctttatgtgaggtgcatgttctaaagaactattaaaactattccatacatcaggtaatcaaaagttgaattttgagggatgtgatgatctttaaaaaattgaaattctcaagatacatgatctttacatgtacatgatctttacatgtagtaggttatgttttcctatttattctgttaacctcatgaaaatccagttcaattgtaaatactaaagttattgactacttttggcagctgttttgatgggaggtataacctttgagattaaaagttgacaatgaagaagggtgcaatttaagctccaatatgtagtgaacacaaatagaattattatctgaaataattgcttttatatccttcttattacagctcctcatttctatctcatcctaaatcttatatttacacatataaacttaacattggtgccatttaactatgtcccctaccacaaagttgatgtgaacatgatcttctcattaccatttcgtattctcatgttaatccatagcacctgcagtcagtgttaaggtagcatatttgtctattgcgctgtttctaagtccataatctcttttttcctttgttcttaacagaacagcctcaaactgcatactgttgataaaaataagcacattggaacatattctttctctcaggaattatgagggtttgagtctggtggaatctcagcctagaatccattgtttttattccattaagtcacccaaagcagctttttttttcctattgggaaaaaagttaaatgagaaattatacaagttgttttgctttccaggctttttatattaatatgggatagtgatcaatacctttagcatgtacggattataactcgtcttttatactgttagtttttaacactaaggctcaaaatgctttagactcctttttcttaataggcctttggcacaaaccaagaagattatgcaagttacattatgaacggtatcatcaaatggggtgacccagttactcgagttctagatgatggggagctgctggtgcagcagactaagaacagtgaccgcacaccattggtcagcgtgcttctggaaggtgagaatgaatgaggagatggcattaaaagttaaaggaaaaaaagcagcattttttaaaagcccgtaagcacattctagaaaagtgaattctttttcgtttttaaccttgttcttgatctgaaaatagtaatccaatctatgtaccaatattgtgtacaaattaaaattttcttggggtagaatgttagtgaggaaagatagcaactagttttcttgtaggattatatctgtatttctgtggcacttaatacactgaatgatgccacttagcctcaattcaattaaataaatacttactgagtacttgtattttagtcattgaactagttgctggggatacaaagacattcaagtgttcattcagtctggtcatgaacaaagacagtgtaaagaaattcctgactacggtgtatgtgtgtaaaggtgtgtgtgaatacaagtcatttagcataggggtggtcagggaaaactagagatgctatttaatctaggccttgaaagaccagttaggattttattgagtagacagacaaaaggggaaggacattccattcacaaataattaatttacagttataattagtatgacggcagaaaagttcagtgaggccccatgacaagggaacctaactacctctaaaggtctgggggatgagagctccctgggagaaacatattaagccatgacttgaccaatgaggagactctggccagccaaagtcactggggaggatgtttgaggcagagcatgtgaaaaagtcctgggcaggaaggagcttgaaagagaaagggagattatcctgacatgagactgtagaagcagatagaagccagttcatataaaaccctgtaggccatattaaagatttaaactatcttaggggcaatgggaagccatttgtaggattttaagcagtgaagccacatcatcatcactgctttatgatggagaatggattggaggggcaaaaagatacagaagagactaatggttagaagcagttggattagtcttaatgagagtcgattgtggtttgaagtatgtggagtagtgtagatggagataagtagactaattagaaatatttagaagatagaataaaaatgacctcattattattgtcaatcataattatgctagcagtttttgagcccttgctatttgccagtcactctactagcactgtgcacatattatctatttaaaccccacttcagtcctccaagggtagatgctgctgttgtctctattttgtaggtggggaagctgaagcctagaaatatttgttagattggatgtgggcagaggtatcaaacatgaccccctgggttctggcatacatagcccgataaatggtgctgtttactaagattgggaacactaatggaaagcagatttctggaagaaagatgatgagttcagttttgaacatgttaaattcaagggtcatataggagaagtaaatcggaaatgttgagcagcctgttggatatgtgggtctggctagcagtagactcatgagttgccagtatatagactgtggttgaagccatgggagtgaacgaaatcacttacagtgagggtgtgggttgagacgaaaaggaggcctagaacttgtctctgaagcatgttaacacgtaaggactaaacagagcagaaaaattgacaaaagagactgagcaagagtaaccagagaggaaaggggaaagagagaatgtgtgttacagaagccaagaaaagaaacatattttaagaaagaggggaattatgaattgtatcaaatgctcctaagaggctgaaaaagataccaaaatgtttgttgggtttgatgacatggagatcatttgtgaccttgatgggagcctgttcagtgtaatggggatgggagccgtaagatttagtgaggatgggtgggaggtgaagaacaaaagcagccagtgtaaataattacataggcaagttccattttgaagggagaagaaggtgcagttttgaggggtatgatgttcagaaagagttttttgttgttatgtattaaactgtcagatagactagaacatgctaaaacacttttggaaaggcttcagggaagaggaagaagtcgaacatatgggagaaaggaacaatcagtaatgtcatgttcctgagaagatggaaaggaagatttgattggtttatggttgaacgagggacacagcttccaaaacagggaagggaaggcagggatgtctaaatgtaggtaagttcgtagatttgcttgcctttatgagaaggcctgagtctttagaattctaactttttacatcacatttgcttctaataaggcagttttcccctgcccccaatatcagctcttaagattgtctttttttgttagacaaatgatttgatagaactaacaacataagtactaatatgcatttgaatgcgttcttttaagaagcaaaacccttacactctgtatattttgccaaaagtttgaaagattaaggatatgtgagaatgtcaggaggcatgtatttcaccatacttttgagaaatgctaattagttcattaagtttagttgctaataaataagagaaaacatgtctgctgtgaaattgtgtcaggaaatgttaatgagcaactagtcgagacctcagtatgttctggataaaagtttaaacttgttttatttccctttgcttaggttggcttttttcccctgacttgctcatatctttatgcaggccctcctcacagtgggaagactgctttagctgcaaaaattgcagaggaatccaacttcccgttcatcaagatctgttctcctgataaaatgattggcttttctgaaacagccaaatgtcaggccatgaagaaggtatcaagattttactttcattttaatttcctatctcttaaatgtgtgtgtgtgtgcacatatatatgcctttgtacatgtatacatataaacccatagcaactatgttcttctcaagtggaaccaaattatcagcagaatatgggggaagcagtgactgttttagattttctaactttgtaatgtattttattgagtacctttaccttctaaattatgctttgtttaatacatattaagtttcattgcctagttttgtatcaatttgattaaaagagttatagttgaaagtgtttgaataaagtggacaaattcatttaggattttttaaagttctttcattattgtacaaagttgaactctttggggtcaattaagttgaggaagacagagatgtatcaatgggaaaatagtcccaggaatccctacaaaaggatagttttatattaggtaataatcagaatctgcttggtaacttaatgcagttctcatacatcttcctttctccaagtgccactcgtcaccttcttaattaacatggccactttctaccatcagtgaagttagaacagcatagaatagaatcctagagctgaaaagactgtaagaccatttggtccatctctcttacattcaagcaagtgccatgcaacaacaacaacaaaaatcaatgatgaagactttaaatggctgttccatcttacttgttagatcatgtttccattgctattctaattttgcatactgccagtcaagaaattattttttgtatccagctgaagtatttcttttatttaaattctttttttcatgcttgatcttttatagatatgaactgaccgtaagtccaagagatgtgggaaaatcagaatgaggtgaaagaatcttgagaattgaagtgctccctagtaaagacagctcagggttttcttttacattgctcttaggcattcgctttataaagatgtattgtagaattcttcggtgtttctttgggaaagagactgaagaagagaaatagatttaaaagatgactcccaaaaaatgtaagcttgagaagctagtctcttgtttgtgcaggtggcagaaaattgcacagggtacttcagatggatggaggaagccgaacttgtagcaggattccaggcatacacattgaagagtccagagaaatacataaaaatgtttgaaattgagtgtgaaaaggaaatattgccagatgcaaaaagaacttataatatcatagtttattctgtctctgaggtgaaaccaatagtatctgtccttcccaggaaaatctgaatagaataactgggaccagtgatttccctagagtaggtagggctgtttttctttgtttttcgttttccctctgatgggaacccttaacccacttcttctggtaaaaatttaaataacagcccttgaaatctgtagctgttgaatgtcccatttatttattgaatagctaattctatttgcattctcctaaatcatctattcctgtgctttttcaaaagtagtagtcatctttgcagatggtaaattactccattgctttccaccagctgccagcttctacctcagatgtactctgagatgtgggtggatggtcctagtttttctataaagtttttaaaaagtacttcaggcttctgcagatcaaagctactttgtaagtgtgagatattatcatttttattattttaatctcttgcaaattgacttgaagggggaaggtaatatgtgctgattttagaggcttaaatggttaaattaatggtttaataacttattatttaatcttcaaattgttgaagcctttcaaggtagagtttcagatgagtagaaagctagggagtataaaaataagtgtccatacaagcttattcaaaattgttttaattcatgattcactgtccggatcatccgtgcactcttaaaattataaaaattatttctgcttcagcagtataacaaatttatattagaatttttggttttccttgggggaaaaatattattctttgtcattaaagttcagaaaagagaaaggaatgaagcataggtttcttagaaatatattagaaatattacaaaatatttccctgcaaatagttttcacattgttacctaatgataggttgacaaaagcctgaggggtcaaaccagtctaaagatgctaagtcttccaggttgtttttgaaaatgaaatgtaaatgtcattctttagtataagttctagtctacctcccactactgttcttgcccctcctttttttttttttgagatggagtcttgctctgtcgcccaggctggagtacagtggcgtgatctcagctcactgcaagctccacctcccgggttcatgccattctcctgcctcagcctcccaagtagctgggactacaggcacccgccaccatgcctggctaatttttttgtatttttagtagagatggggtttcaccgtgttagccaggatggtcttgatctcctgacctcatgatccgcacgcctcagcctcccgaagtgctggaattacaggcatgagccaccgcgcccggcctgcacctccatttttagtgtgaggatggaaagaagatgttttaattttttttcagagcacaaataatttatagagttttataattctggagaaaacctttcttttgttgttgtaagtgcaaaaattaaggtagctttttctaattacagaaataatttagaaaatacaagaaagaacagaagaaaataacaataaattcatatttgtccttcaattctcttttctactcagacacatgtgtacacatgaacacatataccccctcccttatatattggggattacattgaaacatactgatgtaaacttgcttttttcacttaaaatattatgaacttttttcagtgtaactaaagctaatctgaacattattttaaattaatagctgtctaatatctgaacaatccctttttgttggacaattaggttgtttccaggtttttttcacaattataaataatatatatcaaagagttatctatactcccaagttcattgcagcagtattcacagtagtggaatggaatcaacctgaatgtccctcagtggatgaatggataaagaaaatgtgacacatatacactgtggactgtaacacagccatttaaaaagaatgaaatccttgtcatttgcaacaacatggatgaaggacctggaagacctcatgttaagtgaaagaagccaggcacagaaagtcaaatatcacatgtcctcattcatatatgggaactaaacaattgaactcagggaggtagagttagaatgatggttatcagaggctgggaagggtagtggtaacaaaaataccattaaatagaagtaataagatctagtgttggacagcacaataaattaactatacttaaaaatcatgggccaggcacagtggttcacgcctgtaatcccagcactttgggaggctgaggtggggggatcatgaggtcaggagttcgagaccagcctgactaacatggtgaaaccccgtctctactaaaaatacaaaaattagccaggcatgatggcatgtgccctgtaatgccagctactcaggaggctgaggcaggagaatcgcttgaacccgggaggcagaggttgcagtgagctgagagcacaccactgcactccagcctgggcgacagagcaagactccatctaaaaaataaaataaaataatgtgtcgttcggggagtgggcctggtggcagtggcggtggcagggaaagagttggagcagtgccagcggcaagcgaacaaggtgacggaaatcacgcttaacaactttgacaaggtcctggagcatgatggaaagctgaccgaactggagcagcgttcagaccaactcctggatatgagctcagccttcagcaagacaacaaagaccctggcccagaagaagtgctgggagaacatccattgccagatctacttggggctagtggtgggtggtagcctgctcatcatcctgattgagcagctggccatctttctccctcagagtgacaccagtaatgccccacagacctaggatgcaggcaccacctcagggcctggggactgacagctggtcctgagggagaagccaaatggctgcactggctggttccggtctccagagaaccttggtgtttgctctcccctgacccaccccagtgagtgccaaagggcagccccaacacgtgcacccctgcatttcttgtcatgccacagactggccctcgagggcaccctgccatactggccatgccgggccagccccacctgaagctcagtgaaagctgattaaaaaaaaaaaattatgtatagatcaaaataactacaagagtggaaattgaatattcctaacaaaaagaaatgatacatgcttaatgagtttcacaactacccttatttgatcgttacatgttttatacttgtatcaaaatggtgcatgtactccataaatatgtataactattatgtagccataactaaaaatttaaaatttatataaaaacagtattccataggactaccaaactagggaaattactgcccccattttctcattagatttttcttcactagagtagtataacatgaccgagaatttgggcttgctcagctctccacactgaccggccgaatgaccttggatatgtcatttaacctataagccactgttttctcatctgtcaaatgaagataatattaatagctgcattatagggttatgagaattagatggtaatttctgtaaagtgtcacagtgcctgggatataatatgaaatcaatgaagtgtagtggttatttttacttattattatacatacattttttattatttccttatgacaaattctcagaagtgggattgctaaggtaaaaatattagtattgtaaagatttttgatacatagtgctatcaaaactcttaggtaaaaaatgctcttggttttataaagcctacgccttcagaatgttgtactaatttacacttgtagcttcaccatataagagtatgagtttcttgggattctcacccgtacttgatattattaaaatattttttgccagttggataagcagaaggttggcatttagttatttctttagctacatttcaatgactaaatgctcaaatttaagatttttcaaaatgttttgcaatgacaatagtctgtgaaactgaaaaatatgtaacacattaatttttgttaaagatgtgtggtctgaattagttaattcatagagcatctttacctaccactttattacttaaaccaacaggtaagagttttagtagagagggctgttaggcttgctttaatgagtacatgagattttattataattatactattgcctctttttcacaaatggatggtgctaaaatacgtgaaagtagtttattctcaattaatttaaaattcaccttgtacttctcttaatttgcttattagtgaatcctttctccatggataaactcctcaaaactgctgaagtatgtatgaggtattgtcctcacgttctggggggtataccatatgttccattaagatgtttgaagtattcacagaccttccccttctcccctattttacgtttgcttcccaaacttcattctatttttaaattttaattcctttatccatttttgcatcaatacttgtttaaaaatctattttactagttctattcgtgccattaaatgaacaaaagaagaaagcagaatttgattttaactaattacctaatcttgatgctttctgagtatacaatcagtagagatgaagtagaacaatcagatagaactaaattgtttgaacaaaattaagtaaaactaccagtgatttataaaactgtacccattaataacatgatatagtcttattttcaaaggattgaaaattaatggaagaaattttcctttccactagctttgcacgaaagaaataatcttctttgaatatcctcctgtaaatcccactgcaaattgtagtctgcacagaacagaatcgtgatgcctaatcctcctcttttcatggtttagtctatacaaagagcagagctggaaattggatcttttgacagcagttactaagcaacagaatttggatgtttttggttaacatcctaatatataatgtagctgatttgttgaagtttttgcatatattagctgagagaagtgggcactccggaagtgactacaggtccctgtatggctggggaggtgggcatttgttgttgttttgttcaatacactgtgtcttttggcatttgtatctctttggcgtagaaaggaggctggtgcagaactttcagaccttgtgactttttatattattaagaatacccttctctgtggctcacgatatgagaaaatgtaagattttttcctgaaaagcagggagaacaaataaaggattttaaggtcattccaggaagctttagagctttgccaaaagtttaggtccacttcctgaggcagtttcattagcagacagctaatgtttgcttggtctactcccaagttatttttagaaacgagattattactgatagcacccatttgaatttgctcatttacgtttttatatgctaccaaatatgattagagtatgcttttaactaatcgctgacagatttactgcattagggattttctaagctatgagattcctacagtcatcagatttctactaactaggtacttcacgccaagtacttcagaactgagatgaactctttcagctcccagaagaaccagagtgtttggctttgcttacctaagggcactaaggaggtcccagaggatggagggctgaatctcctgagagcatgcttgttgtggcttgtgatcccgaaaggctgggattaatggaactaatgctggtgtgctcccatttgcacttgtgtagactctggagcccgtagctgctgcccctgtcccacacacaggtggctccccagttgtctgaagatcccaggagtgggctctgggacttaagagcttgccgtgtccttgagcaccacattcagacctgcccctaatccctgcgtggcagagccccgcttctcctgtccctcagtgctcacggagtgcatgtggcacactcttgccttaagcccaggctccccacactctgggttgtctctcatacccctccagcctgtgtcgtacctccacctttgcatgcaagagaggttacagtttaatatgacaatctcattatgtgcacaggtggacataacgggcttctgtgttttctagagctgctcttccttcctttagagtagacttcccgttatttcatgagacacaggctgactgatgccactctttcccacattgtttccttcttcagttcttcctgttttttctttagccttctctttcagacttccctcctaactttaagaccctatatatgtatgttgataattttacctgttctacaggaaacttcataatagaactgggctgactatacattctttttctgtgtgtgtgtgaatatatactttttatttagccatttttgtttacaattgaaactctgggaattcaaaattaacatccttgcccgtgagcttcttatagacaccagaaaaagtttcaaccttgtgttccacattgttctgctgtgctttgtccaaatgaacctttatgagccggctgctatctagtttgacggggattctcttgcccacaatttcgcttgggaagaccaagtcctcaaggaaggcatcgtgcacagctgtcagagtacggctcctgggacacttttgcttattttttgtacggctttttcgagttggcttaggcagaattctcctctgagcgataaagacgacatgcttcccactgaactttttctccaattcgcgtactagccggacttggattttctggaaagatttcagttgaggaacgggaacaaagattatgatagctttccgaccaccaccaacttcagtttccttggctgccgtaatattcagctccctgagctgagccttgaggtccgagttcatctccagctccagaagagcctgggagatggccggactcgaactcgtccggcttctcgccattgggcttcacgatcttggcgctcgaactgaacatggctttctcctgggagaacttgcagcgcctgcttaggaagagacccaaatctcgcgagagcacgtcaaaatccctacattcttaagattaattttggggggagtctgtaagatacggttcttaccttcttacctccagcctcagtcctcctggcatcttctgtgttggggcatctttggatctagagcaagcactgtgtgacctgctgtgtgctataactcacggtgagtttggcacttcagttgtactagtctggctagggcagtttgtacaattttacttttctcgcatctttctttccagtacctctcctcctgctgggatttatctacctaaagttgtggtgcagcttcccggcttagtatgtaaatatctcacttggattttcctgtggcagctaacctcacgtacttgccagccaactctgagtatcttcttagtgagaattctgctggggcctgggccagaaagggtgaaagggactaagggactgaggagactaggcagaaatcgtggatcctgggaagagttatgagcacaggttacactagtgactagataaggaagaaaatgtacgtgtgagaagaaaaagggatgtgtgtgtatgtatgtatttaaattagagcagagtagctacccggaggagtttcagttgactggttacctgaaactagtcaagttacaactggaattgcacagccttcgtcatggtcggtgtgttaatagagcttgctgtgagtgcacctctccctctgatagtaattagcacagagaccgactgcaaaaaacaagaacgtcactacttgatattaagtgactgctgcaggtatttttcctctcaaatgttatgtgtaggccatgcagtcaactgtgaagtgatttggaatgctttgtgaattacagtgtctgagataagttggtgagactacataccatgtagcaagtcatcattagtttagacctaagcaatgtcctgagtaaggtccttgcagccatataagctgtacattgttttgagaaggaaaaacatagaactactgcaaccagccaggctgtggtgttccaggtccctgtggctctaatccatgatctcacagcctgatggtcagagttatatgctggcatcagagcttttagtagaattctgaaaaatgttttgaaaagcaaagcattattttcagtgattccttaaaattacctgagtttataagataccacattggctgcggttccatcttcaaaaaaagtagcaaagaaccgctgtagaactgcttctgagcttttcagttgtctcgaatgtaccaactcaaagccaaaaggaaccatcattgtgtatcaagagactgaaataaatatcctattctcattttctctttttctgtgtttggggaggagaagataaaaggcccttcccttcttgctctttaaatgtactcatgatccattttcaaaccagcttcacctctgtgttttatttcagttgccaaatcaggacagatccttgactccagttttctctttcatcaccacacccattcattcaccaagttctttcagttcctcctcctaaacatctctagattctgtccacttaccagcacacccactccctggccaccatcatttctcacctagaactccacaatctcaattaactattattcccctctaatgcttttctatacaatcaggaaaatgtttctaaaacataagcctgacatgtcagtccattgcttataaccctttagtggcttgttattgcctttacagtaaaattttaactcatgaaatttgtaagactctttacgtccaagttccttcatcacctcttctaattcatctcacctaccactccactgcattgacaccaacaccactttattttaattcttattgaccgttcctgcagtgttcctgaatgttcacatctctgtgtctcctaattttcagtatattctgcttagaacactttcttccaccctttccactggttaactgttgttcatgcttcaagtctcaggttaagtgtcacttcctaaatttaggaaactgtcctgactccctaagtccatttaagagtcaagataggctgagttatgctgcatgaaaggacaacccgaaaatctcagtggcttaacacaacaaagtttattttttatttacactactatatctccgtcatggctcagacagtgagttctgttcattatattttctcagagactcaagctaatagataatagaggccccgccttacatctgattccatgatagccaaggcagggaaaggagtatggtgaatcatgcagtgactcctaaggcttctttcagaaaggggtgtatttcccctcatatttcattaaccaaagcaagccccatagttatgcctaacttccaaggcactggggaaatactgcctaccctgtgcccccgtatcatcttgtatttcccctagcctaataatgtcatgctttgttataattacatgtgacttgcttccccaactctaacttttgtgaaagtaggattatttttgtcttatttattatcctctgcagtgccttcattaatgcttgatacataataagaattcaaaaatatttgttgagtgagtgaatgaataaggcagcactccaagactcaatccttaggcctttttttcttcttcttctgccatttcttcttgaagatggcttcctctgtcatggtttcagcagtcactgccctgagagtgatttccattccctgacttcaatcagatatctccaacttctcacttaatatttctacttgaatttaaaatgtgtaaatttattcttttagtaaatacttcttaattactctctaataaggcattatattaaatgatatgaggatacagaggtaattaagacagcacttgccatctgagggcttgcaatctagtataatacaaaaatagtacaatgaatcaataatatatatacgtaatatacaaaatcctgtgccaaaggagaagacaagtgatttatggcaagatggaattggaacttgtgttgtttcaaccattgaacctacagagcagacatcattactgaattctgttctgtgctgggcactacacataacatgaacagaataaagcttttatccacctcacagtccagtggggagacagatagcttaggacgaaaggatagatggggtttagacagagtgtgggagggtaattagggggtaaagggatggtgcataggaaaacgttttcaccagaggggttgacctgattaaatatctggagaaattgtcagtatttatgccaggaaagaggtaaggaaggaactgaatcaagatggtcacagtgagactctattatggtaacttaattgttaggaatactttaaaaaccaagtatacacaggttgtttttaaacctaacatgaaaaatggttaatatcatgagtttgactttatttctgtacctaattataagtcttcaatggttaaaagatacccaggaaggaatatatgccattccaagcaagatgttggtgcgggtggggatcgggtttactatcttggtgtgctgaggttggttaccaaccagagagagtgggctgggatgcagaaactaattcttactcatgacactgatgagatttcctgagccccacctgtagtctctggaatagtaccttcatttccaaaaaggctagtctcaaggccttgagtacttctattcaacttgcagataagctaattcttctatctgatttgaaattactacatccttgccaggctaaaaccgttccttcactgcttaatttcattctcattttcttgaccatcttaagacagtgcattcatatcttttgtctggttttatacgtacatctatctgatccttcatactcaacctttaattcttttgtaagctcttttaccattatggtctgatttgagttgacagaattctgatctttcagtgttacttttgcttaacagagccacaattcttatagataataaaatggcatctagttttattttacacatctcttgtggctccatctagctcttgagtcattacactaaagtcctgctcctgacacagataccagagaccagtgtgatagaagtgatgggatgtgtcagttgattaatgatcagctagtccccagcctgcccaggtgtgacacacacagctgttagtgctgaaaacagccttagcctgctctctgttcagcggtgatccagtgtgtcaattctaatttattgtagtccaaagtgttggtgttttcctgtgctttgtttagtattgctcaagaagtaactaaacttcttggaaattgtcgtaactgtggaggacagtgagataataaatgactttgttttctttcagatctttgatgatgcgtacaaatcccagctcagttgtgtggttgtggatgacattgagagattgcttggtgagtcctaacttctgctgttgtattatctttgccacattacagctaatatctcaaaagttacaagagaaaattaacaagtatttataaactgtaaagcaatagaaatacctttctttgtcttacaaggaaatataatgttctctcttaaatagctgacatcaatgatagtattcattttaatatgccctgtgactataacaccattataaactgctttcttgtaagggcccatgtctcattttgtatcttccagtgtgcccttgccatagtaaatgattagtaattttcattgatgagtatatctgttatttaggacctctgagctcagaaattcacttgtgaactttgacagaactaatgaaagaagggtttaggatcacagagaaatctgcaaattcactaaaacactaagggcagaagttgtaagctctctgcacctcagtttctgctcttacaaaacagagactataatccctctcttgcttatcccacagagtaattgtgaagacaaaaatgggataataaatcttgaaaaaattttgtaagttaaaagtgcagtatagtaatttttaaaatatgtattaaatatctcctgtgttgaagtgcactcctacagaatacaaacatgaagaagacttggtcctggcacttaactcataagaaataaactgcaaggaagggccagaaagttgttaattttatttcactgtaaaattaaatcagtctgacataaattcattacaacaatggctcaggaaggggtaatacactctattgaaatggaaacccacctggtgacttaataacatctgaaaatactacccagtgtctgaataatcccttcttctttaagctgtccataatggtgtagtcgtgatttcaagctaactgttcttactgcatttttcccatgattttcagacctgcttttggtcctctgttatttatttttttaagttttggcagtgtctgttataaagcaaagcaggtatatctgtgaggtctccataaattgatagtgggttttgggtctgctaggtttgatacatctcagcccagtttatgggatgatttctttaaaagcttttaggcacaaactcatagctctgtgtaaattcctttatcttaacacaattgaggtgtgtggtcatagcaacactaccatgtcaggaatgtgtgccctctgagtacatttcactggtatgaatagttatcatctgtgcatgcttgctcatttattcaataagcacttgctgagcccttcctcctctggtagaagtattagagtctcagaaaaagacgctgctgcctgtctttataacatatgttggcaaatgttaatgcaaagtagaatgtgccatgtattttggatattctgtttttttttttatttttattttccctcccactgttctcatcaggtggatagtctgaaaatggagggatcagttttgacctcagggggcctgcgagtagctctaagcccagggcagaggtgcatatgcagtatgcagagaaagctaagcaggtggcatttacgctgaatcttgaattattggtaaatgtttaacaggtcagatgttctcttagaaagttatctgttccttaccatctgagggccaatcttagtggttctgccattgtttccgttttattgaaattccttattttcccctttgcccattttctaacatcatgttttaatatcagtgtactgaatggccatggtttgcagtaacttcttagaaatgcttggtaaatacacctggaatttttttttccttccaaaataatcccagaaaaaacatctacatgaactcaaagtgaatatttagaagctttttcaaaaaatttatagagccgagtacagtgggattatggcaacctataatcccagctacctgggaggcttaggcaggagggttgcttgagcccaggagttcaagacaagcctgggcaacatagcaagaccctgtctcaaaaaaaaagttacagataagagttcttatattttaagcatttaggttattagagatattttttcttattataaatagttttatgactgttatttaagactgtttactctttaaattttttttttcttattctatacatattctgcttatgtagggactgtgtttacttttgatgcaaaaaaaaaaaacaaaaactgaatgtttggaatatgtacatgtgtatcaaatccctaaacataataatgtttcttttccagattacgtccctattggccctcgattttcaaatcttgtattacaggctcttctcgttttactgaaaaaggcacctcctcaggtaaaataatactactaataaggaatattttaacaaagagtttttcagtaaatcgcatataatgatacaatctttaaataagcaggttatcataaacataaaattctgttgttgaaaggattttgaaaggtcgtccagtcttgacttctgtttaaggtaaattattttatcaacagaatttttccattccttttctgaagaaatcaaaatcccacagtttctgtgtggaatacaacaattagcattgtattttgttgttttgtaagttttccaccatattacatatccctactacctccaactgccaagggagattatgatattaatagagaaggcattgaatatgttcccatatgtttcatttataatttcatgggttttcctaaaaatttgtttatggggatatttaagtttattttctttgggcagttaaaaaactatttttaacagatgatcttgagttatttttcttgggtcatgtggcacttttgaggagtgaatttatagccaggatcttgattcctgtgtttgcatttttactgatgtggctattagagacttgtgattttggtaggttaacaaatttaaaaccaacctatgaaggttggttaaatatgttaaattatgtagaggctgccagagcatgtttggctgtgtcacaagacatgagttctcttgattgattctgcatgctgtaaccttgaaaaatgccaatcaaaggcaggtacaaagcagttaagcactgacttgaaaagcatcttaatgtctgtatgagaatctcatatttaaagttagagatagaaactaatctgtaaggaaaatatttactcttaaactggtgaatctaatttttaatttaacagttatatatgtgcgtgtattttgcacttaaaagtaaatgacttgtcttggtttttctggagtttttttttaacttctaaaataatgaaaagaaacataacctataatagtcttgaagatttgcaacatatgtgtactgtggaaggatttttaaatcagcttttcataaaccatcattcctagtaattggagtcttagcttatactaagggtgaagttagagaggtgagtgtattttccctttctctgattcctgcaatattttcttaagtaagtaaacgtatatatctaaagttgctgaaacagaaataattatctacatatatcatgattcctccaatgttttcataaataagtaaacgtatatatctaaagttgctgaaacagaaataattacccccaacatctacatatattatgcacacaaaaaaactttatgtcagcatattaattataaaaactattagaatgtgagactttttctaggcatttaaatttatctcttaaaatagttcttcttttttagctgaaaataatttatgctaaaagtcacttgggagaaggaagattaacttcagtgctatcttatacttcttgttctttacattgttaaatactatacacattgatttaaacagaggtacacccccttggctgagaagcatttgtgatccaaagtagatactaacagaaataaacagaaactattaacgaatgatctgccacactaagatttaagaataattgtttctgtgttgtaaaacttattgtaagatttttgagggaaggaacattatcttatgcttttaaatctcacagccaatggcatagaggcttatacgtacatgcttcacaaataccttatcaacaaaaaaaaatttttcagtgtcttttcattttagtgggctcaagtgttttcatattgctggagtttatatttagacaggatatgataagagtgaaaacattcaaaaataagtaaagttcaaatggccaacaagtataagaagaggtactcaacatcattagtcatcagagaaatgcaagtcagaaccaatagtgagataccactcattgcatacctgctagaatggctatcatcaaaaagtcaggtaatgacaagcgctggtgcagatgtggagaaattggaacctgtatgcactgctggtaagaatgttcctcaagaggttaagcatagagttaccatataacccagctattccaccaagtatacacctacaagcaatgaaaaacatatgtccacatgaaagcttgtatgtgagtattcatagcagcattattcataactaaacatttatctgataaaatctagtatatccatataatggaatattactcagcaataaaaaaaagtagtaccattacatactacaacatgaatgaactttgaaaacatgctaagcaaaaggagccagtcaaaaagaccacatattggatgattccagttacatgaaatgtccaggactggcagatctataaagacagaaaatatatttgggatggcctagggctgggaggggagaatgagaagagtgagagggtcactgctaatgggtatggggtttctttttggggtgatagaaatgctctaaaattgattttggtggtgttgtgtatatctgtgaatatactaaaatactgaattgtacactttaaatgggtaaactgtgtgctctgtgaaccatatctcaagcgattacattttttagaagtggtttaggagctacttaaatgatgaaaggagacatagagttagaagtgaggggtgagcatccaaggtacgtggcccagcttgggagaaagaggaattggatcatttaaaaagaacatggagtgaatttatctaaggactgaagaggaagaatatagaaatatgtaagaagtaagagatgtggttgccttagtgattggaaatggcaggggttctctctgaagggaataccatctggtcattaatctgaatttggtgactctgacctggactgccagattacctgcagtatacatgaatcagtaacaggataaattaatatttgtagtatttctagttggcatgtatttaacaaaataaaaatgtgctttgtcataccaccttgctttttaaaatgtttatattctctcaagaaaataaggggaaattttcaggctgatccaagtgttaagaatattagtcattgtaaaatggaagcattcactttgtcaaaccattagcatatagttttttcagatgtttttaattaaatattaaaggtatattcagctaaatattgtagaaatgcatagagtgatagaaaaatatttattactggtaagaaaacaaaagttgtgagcatttttctttaaaaggaggaactatacttatatacactacagtaatcatatcagtcacagaatcctcaattttgcatttgttgtatttccagctttcacacagaaaaattgtgtgtgcatgtgtgcacgtgctcaaataaaagaatcccttcaggggcactatgttgttatgtatccagatattctcttttctccttccacccctcccccaccaccccctcccttcttgtaaattggcttattaaaactggttcccaagccctccttttttccctttgtgattgccttggtcttggattttcagtgtagaactaaaaattcaagtcagatttcagttactaggataattttctttgaattttaaatttttctaagtaaatgcatagatttttaatgaacctggtattcagtggatttgctttaaatttagctgcagagttaatttcatgattgatttattagccctttgaaagtataaaaagtggtatctgcagttcgtgaagagtgaaaaacatcatcacattttgtttagcatctttttaaaaccaattaaaagcttttctaaaatggattgaacaggagaaaataaaacatgttccctaggtctttatttcaatcaagtttccctgtgttctgcaggagaagagatcgagaggggatagaaaaattgaaaagggctgtcccagcagggagccaagccggaaaaaagggcttctctgagaactcagcagcagcagctaagaaagctcccagcctgcttcatctacatgcagagtcacacaaggcatgggggtgctcactgtcacacagaggtttcacatgtgcttccctgctgattcctgtgaaaagctaacaattggcttggagggtaaaagaccactgcagttcaccctccctgagctggacgtacaatttgtccagtgttaggaaatgtccggcttagcagtgagaggcttgaagacacccctccttccagtgagattcctaacgccgtctcttttacttgatgacactggggctcttttcaagttttgcagatttatggaagttgaggggaatgtgcttttcaagatcaggaggatgaaagccttggtcttaatgtcaaggaggaagcggtagtgagtggtaaggccaggtaactcttcctgcagcctgcaggaccagtggcttgatttttcctcatagatctcttctgccaccttcttttttttttctttttgggagacagagtgtctgaaaaggaactccttgggctgtaaaatgacatgattccccagtttcctcaacaagtgtgagagtagttaagcctattaacctcactgtttaatgctgggtttgacacttttgtgcatcaaattggaaaacctcatctgtatgtaacagggtagcctcgtaatttatggaggagcaatccttcctcagttcagtgcttcccaacctttttagattatggtgcatacaaaatgataacatctgatgatacacttgggtaagtggatgaggccactcacaactggccagggctctagccttcccaacagctggcaggaattgatatcttagtccaggtataactcatttgaagctcaacgattggaaaactctttggaaactttaaacttttacaaaagaagaattaccactccaacgtcatagcagtattactgaagtagaactcagacctaacagttattagtgttctggctaaattttatgatgttgttgagaatagtaacttcctcgctgctctgacacctaggaatattacctaataagagagaaatacagcttaaagcttggaggacctaaggtgtggaccaataagaaactgtcagcattctcaggatggggacttgggtagacacacttgtttctgcatgagttttgtttttaacatcagcagtctctagacaacattgctttcatgtagtccttacatgacatcttagcagtcttacttcagatatggttataggacatcttggtatcttgataatattaagcaactctttaggctttgggttgctttagtgaaataagcagataatggaagagactccaaatcatgcaggcctaaacatgagtatctctccatctatttgttcaaaattaactctggctaatgactatgatatgactcaataagatatataaccactttaggaaagaggcttagtcattttgccagacacattaattttaatccactgatgtggtgacttttgcattgggcttcatttcttttatctaaaaaaaaaaatgatgcttgacagtttagtggccttcttagtaagtcagtgacattagatacctactatatttataatactctctttaggtatactttgcttagtatagtagattttcttggaaagtcctttgtagattgaacatgtgtgtgtgtatatatacatatctctgaggacaaaggaaatttccagagatctgtgttcttgttttctggacagaaagataatgtatagtgaatgtatagtgatcaactaagataatgcctagtgaagccctttgtaaacctgtggactacatagatagacagtattaaagaacatatatatatagtacatatatatgtagattaatttcaaatgtatcaaaaacagtgaaataggccagacattgtggctcacgcctgtaatcctagcactttgagaggccaaggcaggaagattgcttaaggccaggagttcgagaccagcctaggcaacatagtaagaccagtctttacaaaaaaaagttagtcgaatgtggtggtgagcatccgtagacccagctattcaggaggctgaggcaggaggatcgcttgagcccatgagttcaagaccgcaggaagctgattcttaccaccgcactctagcctgagtgatagagcaagactctgtctctaaaaacaaaaccaacaaaaaacagtgaagtaaattattttataaaacattgctacagatatctgctgaataaaatcaaattttcaaaatagggttttgttttggttttggtagagcacatctatagtagatattaataccagaataaattataagatatatatgccattttctgataactcaaaattaaatatctaaattttaatcatcagagaaatgctaatagtgttgagacgaaatattttttcattgctagaatgtattcttccagatccattgccttaaataagttactgtggcattacattagcttttgaaaggtggggattataacgtcgtagtagtccatgggtgccatgactctagttaagagcaccctttctgtagaacttactctttgtattgaacttgaggtttaaaaaaaaaaaaaagaaacctatgtcttagctcagatatcatctggcattatagccttgaacgtcccttaatttcttggtgtctatttcttcatctgtaaaatagagataattcctcatgtgttacctactctgttgagggtcagctaagataatgtgtagtgaagccctttgtaaactggtggactacatgagctgtccaggcgcagtggctcatgcctgtaatcccagcactttgggaggctgagacaggtggatcatttgaggtcaggagttcaaaaccagcatggccaacatagtgaaacccgatctctactaaaaatacaaaaattagctcgacgtggtggtgtgcacctgtaatcccagcgactcgggaagctgaggcaggagaattgcttgaacccaggaggcggagtttgcagtgagctgagattgtaccactgcactccatcctgggtggatggagtgagactctgtctcaaaaaaagaattgcctttggatagtccacagaaccttttcagcttgtaagataggaaaactgaagaacgtataataactgctatatagaggaagtttccataggaagtgagttcagagctcccactttggaatgcctgaacccaacttccctcatttgcagtactgggaaaagaaacctgcttccccatctctcattcactgaaatttagaagcttcctacatcctaagacaaatactcttgtctggggattagggattcctgttgtagaaagaagtaggaagtggagacaggaattgccaagatcagtaggccaccaccaggtcacacttgtcttcagcctccagggactggcccacctgcttcctttccctgccaccacctgttgcttgtggctgaagttccccttttctcctaactcatggtgcaacaaagtggtgcttcacagtttctttcctacctttctgtcccagaaacaagaatgcagatctttggagatttcctgtgtccttggggatctcacaatggccagaagccctggccctccctctactccttaccctgttaatcttggatggtaggattataggtgatttcttttttattttgctttattgtttcctgtactttatagattttctacaataagcatatgttactttgataatcaggaaaaaataaaaaatgtgtatacaattatttttaacttagcagtataactgtcaaaaattccttaattccattgctttggtactaatttgctgctaaccactagggttaaatgagactacctttgtatctaagcttgtctatgtataatatatttttaaccttgttctttttatgacttaagatttaattgaatatctgaaatatgctgtgggttttggagtaaaagtgtgcaagtgcctcctaactctcacagttgtcctgggaaacccacctggcacttggctcagtgccatgctccccatctaaacttaccatggttgaatgccagtgtgactaaagttgaccaaggtagatggtaacgattgtcttaagcttcattgaaaggagatcggaagtttctttttcaccaaaaatatttcttttgacatagaagtttaaaacatttctttaaggaacatctgcttttattagatgtacatttaagaaatccttctcagtatagagataaaaagatgaataagacattgtacctgccctcagatggctcatagtccaagaacactgttcaattgtgaagtttgtgcacaaggtgggcacaggtcaagtagcaaatgaaggttaacatccagcccacatgctgcccaccaaggagtccaccctggtttgggactgaatctgccctgagtaaggttaccagatttagcagataggaatataggatacttagttaaatttaaatttcagaaaaacatcacataattttttagcatcagcatatcccatattttggtcagacttatactcaggtatttctctagcaaccctaacgctgaacaagaggaagagggtgccttttagctcatacgaggtgctggggcttggggaaggaagcaagggtggctgcactcacccagatgattgcttttttctaatttgttcacctagggtgtgtgtgcgtgtgtgtgtgtgtgtgtgtgtgtgtgtgtgttttctgatccatgcagaagctaactggtgtccctgtcacaatccagggtgggagaaagatgtgaaaacatgatgcatagagttaggttttatatgttacgtggttccagtggaacataaaggaaagtgtggtccattttacctgagaagatgtgcaaatcattcacaaatagtagtttcggatcctggtcttgaaagatgagtaaaagggagatttagtcagggccattgtgccatgctaaggaattcaagcgctgcagcaatggagagagaaggtgaaggatttatgtatgctaaaattagcatattattattattattattattattattattattattattattagagataggatcttgctgtgttgcccagggtggagtgcagtgacgcagtctcaatcactgcagcctttacctcctgggctcaattgatcctcccgcctcagcccctggagtagctgggacaacaggtgcacaccaccacacctgactaatctttatattttttgtatagacagggttttgccatgttacccaggctggtctcaaactcctgggctcaagcagtccacccacctcagcttcccagagtgctgggattacaggtgtgagccattacacccagcctaaatttttttaattaacgtacaatatgatacttgagaatttgaggatatgttctgtgtacttatcttaggcttcatatggcatagtttcactggagggaagaatagaaattcataagaaattataggcttcattttttctaaatgactgaagcttaacctctttaaatatcaattattatactttagccttttttaagaggaaaaaaattgctacatacattcttagtgtctgaagcaaagtataataaactctatgttaatgaataaggaccatcataacaaaccataattgatgggtcagtattttcatgggtgggactcagcaggaactgttggaatatacaggattccgtcctggtgcctgttaggtagatacggtgtgccctgtttgttgagttttttgtaccttttctttttttagtggttttgctatcagctgttacttgcagaatccaagtgagttgtgtcagctggcctgcctctgatgactcctttttccagtgtgctgctttcatctgctataaattaaggcaggcaaccaccaggattcatgagctgttcatacagtaagagaactaaactgtggttgggcgcagtggcttacgcctataatcccagcactttgggaggccaaggcaggaggatcacttgagtccaggacttctagaccagcctgggcaatatggcaaaaccccatctctactaaaaatacaaaaaagtccaggcacggtggctcacacccgtaatcccagcactttgggaggccaaggcaggaggatcgcttgagtccaggacttctagaccagcctgggcaatatggcaaaaccccatctctactaaaaatacaaaaaagtccaggcacggtggctcacacccgtaatcccagcactttgggaggccaaggtaggtggatcattcaaggtcaggagttcgagaccagcctggccagtatggtgaaacccccgcctctactaaaaatacaaaaattagccaggcatggtgacaggcgtctgtagtcccagctactcaggaggctgaggcaggagaatcgcttgaacccaggaggtggaggttgcagcgagccgagatcgcgccactgcactccagcctgggcaacagagcgagactctgtctcaaaaaaaaaaaaaaaaaaaaaagccaagcatggtggtgcacacctgtaattccagctactcgggaggctgaagtgggagaatcacctgagcccaggaggtcgaggctgcagtgagtggagatcatgcaactgcactccagcctgggcaaccagagtgagaccttgtctcgaaaaaaacacaaaaacataaaactgggctgcagtgagagctggagaggccttccagagagcaaggccccattttgactcctgtgggccccttcctctactaaaaaaaaaaataaattttccacctgttggtacaaagctgaatatattactatattaatattttcttccaccaaaaagttctttttttctgatttttttttttccaggagtgcagtggcgcgatctcaactcactgcaacctctgcctcccgggttcaagcaattctcatgcctcagcctcccaagtagctgggactacaggcgcacaccaccacacccagataattttttgtatttttagcagagatgaggtttcaccatattggccagactggtctcaaactcctggcctcaagtgatccgccctcctcagcctcccaaagtgctgggattacaggcctggcctgattttaaaagaaattagaataatactttcatgggttcctcaaagtttcataggccctgggcactgtgtctagtgggtaagttgtccttgcctgtcagttttaaagttacttgaacctcacattgttttttcagtactaggagtgagaggatttttgcttatttctggttcttggctgtgctctggatagttgaaattgtttagcagattggcctccagataagtaaggcattattattggatatagtaaattcatgttctggaagtttggggcctaaaggagcaatgtgggctctgtagggttaaatgagggcagggtatggtgagaaggcaaattttgaaacattgtgaacataagagacaattgcaaattggcagaaaactggagaaagcattttaataaacaaatgctatggataaaaatcacagaggtaaaaattaaattagaaaggagaatattgacctgattagaacacaggggtcaatttagggtatatcaagctaaaagctgagataggtagggaaaatctactgtggatataagagtggggagtttggatttgctgattaatgtgtggtcatcttagttaagtttctaatgagagagcatgcacagaacccttcctttaaggtattaagaatactatggcatggtcagtacaactttatctttttctttttttttttttttggacaccaagttttgctcttgttgcctgggctggagtacaatggcacgatttcggctcactgcaacctccgcctcctgggttcaagtgattctcctacctcagccccacaagtagctgggattacaggcatgcaccaccacgtccagctaatttttgtatttttagtagagatggggttttaccatgttggccaggctggtcttgaaatcctgaccgttggtgatctgcccgtctcaatatcttcttaatttatttaaccttttctcctaagagcacagaggtcattatttctaggtaataaatctccctaactcaaattaagagatcagccattgctgatatggggcttgtgggggcaggggcaagagtggaccccaaatctagtttaaaattacacaaataaaaacagtagacagcaaagcatagtgaaaatagcaatgaggcctgaactgtagtttcagctccctcactggacatgagagcctcagacagatcactttacctctcaccccaggtttctcatctgcaaaatgagacagagaatgagggggtttgggggaatgaggtaatctttaagagctgctcccaatgtaaaatctgatgattcagtgtctttttcacaaattggaattagatatcctttaatatcatgaagtctgcttttgcctatagtattttaaattattaagggttcagtttctcgtttcatattcagtctgtatcatgaattcccccccttattgtcttctgtcctgcttgcagcaccatgaggatggttacaaagaagtagactaagaatttgcttcagggtaaaatctaatggagagtttaagtgtagttgcctgcctagttgtggcatgatttatttgaaacatccttcctttggtattcagcttaaacatttaactgcaaaaaaaaaagaaaagaaaaagttacaggcatttaaacaagagaaatcagaaatgcatgcaaagaggcccaattcctctcccttcacttgtctctggttgcttttaatggtagtcgatcttttcccttggtttggggaaaccaagagttgtaggagatgttaatagtacttggtttttgtttttgttgttgttgttttgagatgttttgctcttgttgcccaggctggagtgcagtggcgccatctcggctcactgcaacctccgcctcccaggttcaagcgttctcctgcctcagcctccttagtagctgggattacaggcatgtgccaccacgcctggctaatttagtagagacagcatttcaccgtgttggtcaggctagtctccaactcctgacctcgtgatccacccgcctcggcctcccaaagtgttgagattataggtgtgagccactgcactggccaatagtacttgttatctcactagcttaggttaatgacagctaatgaatcttatctttcctctgctagagaagtctgtgttatccagtcaatagctaatcaattgattaaaagagataagccagactttggcacgaagcatacatgccgttcattctagattattttctttaaaatttgttgctatcaacacttggggctcagaggtgtagactctgaaatgatagttactttccttttggacacttaatataatgtgcatttttctaggaccagaaagtaataatgaaggagtgatctgctacccttgaaagctatactgggattatcattcattcagtgcatatttattaactttgtactttgtacaaggcagtatgctagccctggaaacatcagtaaagccaaaccgacttaagtcctgtcctgatgaaggagaactagcaagaaatacagtaaatatagtaagtatatagtatgtaaaaggcgatccaaactggaggagggaaagggcaggataagggttggggagttgcagttttaaatggaggtatgtggggattgagttggcctgtggaaaagctgacattcaggcaggtccttgacttggagggaaaggcctgtgtggctatggaagggaagagcattccaggcagaggaatcctctctgtgtgccaggcatgccatgctgagtactgcaagggcgcagatggatgatacgtggtttctaccatcggggagttgacaggctagaaacaagattcaggcttgaagataaatgcagagaagcactatggcaaggtagaatttttctaagggtctctgttgaataatacaagctaagaaaatatgaaaaattattcctatttcaagaatgaagccaggttaagtgatagaccaaaggacctctaccaggaaagcttcttactcttggctctgagccaatttcctcctcagaagttgctgcctctccctgaggccccacgctgccatgagtccttctgactctctgtgagtcaccccactgccatgactccttcggagggggtgtctgacctcttgcttcaggcctcttctgggcctcacagtaacccttgtgaagctgaagatgggagctctcatcttccctaacccagagccaaccttggcctctctgcgtcatttgctgccagtgccctgtgtttgtttttgggaagagagggattttcaggcatcccgtccctcacccacctgacctaaccgtatggattcctgacaccacaggcagaggactattcttcaggttcctctgaagcccacctgttcagatgcttgcttcttttccttcttgcctgttctgactgtgatgacagagaccccgcctcaggaatctccacctcacactctattctcataagtaggtagaattttctcatcgcatatttatggttgaggaggagatagatgctgagaagttaaataatctaccccaaatcacacagctgtgagtgatggggcctctacttctgttgcaccaagctacctgtccatcaggggacttgcctcaccattgctttctgccagccctgggcttgccttaaaaaggacatcatatgcataagacactggttaaaaggtgcagcatggtccctggagatgctcactcttacaactggcctgtccttggggcagcagctcctcacaggcccctaagaggtagacctcctgcctgtggctgccagaaccctcttctccatcacaggtcttcctcctcaagagccttctctggtttcctgttgctttttatattaaatatttcccttagtttagcatcccgagtctgccttttgctgattgttccctccctgtgtctgcagacaacttcgttttcagccttggtgctctgtctcagctgcttctaccacacacataggatttaggcgcattcaggacctgtcccttcttttcaagggccttgccagtgcctacttgttgtcattgtctttgcagtactacggataaccttcctagataacccccctccaggaaactgtccccataaaccgggtgccctccgccatgattagtttgtatttgcgagtgtgttacttggttgtgttccctgaatatttatttggttttcccagctaagttgtaacttatttgaaggcacaaaccaaatctcataattctattaagtacctaaaaggagtaaattattgttaatgctccaattggctaatgtctatttcatattttacttaccagatttacaaatgcttaatattctgaaatatttcactctcatttacaaaaacatcagattctactaagcagaaaataaagtttaatgcccccagcacatagcagttttgagttgcacttttaaactcacttcttaatccatttcagggttttcaattgttcacagttaattcttcttaccaagggtgtattacacttgctcagcattgaatgatatggaaagaatggcctttctttcctgcataactgactttacttttgttcataggttgaaatcagcccttccatttcactgcagtattatattagtggcatttttatttagggaaaaaaaaaagctttcttccacttgaacttttgttacaaatcagtttattgggtccaatcaatgggcaagacctatgaaagggtgtggattatctggttggtcctttgtgtggcaaaaggcttagatgctgcttagtactcgctcattcttcatcatgtaaagaagtgttttttttgaaggatcaacacctgactgagccctgcctttttcatggaaatgttttcacctgagttgctgcttatggtactaagaattagttaactaatacttatttaaccttggaacaatgtttatcataatccgattggcagatagtcattttacttaggctttttctttatagcatcaggactagcaaatctcagtaaagagtatgctgggagcaatttcttttttcccaaataggttatcactctgtgcttttttttttgctttccgtcaaggggcatgtttgggcactgtggacattaagactggtggccacacattaggaaggtggaggtcccctcttgggttgagcaccacttttgtttttaaagctgcatccccatttcatgctgctggcagtgtttcccttcagacgaatcccatgcaatgtatcactttaatatattcggagctgtttttcatgataaagcttccttatgagcactaccactaattaatacacaaaatggcccagcacaatttaataatttggtaatgtttttcaatgttttcttaaagatgacgctttacaagtcaagacccaaacttgcctgggtcatgacctctttgcagtttttggagtcttgttaaacaagaaggaaagcaaaacataaattagcgtctccagtatggttgctctacatttcccaatctttcaacactttgaagagcatagtcactgttaatgtaagagaacatctcatgaggaaactggcagcgattttaaaagtccggctttctggaatgagtaagaagcttcttcctcagtgccactgttctagggccaacattgtcctttgtgagagaggagcaagatgaggaagtttgcattatggactatggaacattaaaaagctaaaaaagagaagtaacagttacctttaatcatactgaggatgtatcagcatgtgtggcctttggcatctgttagcctttagggctatgttcccaagtttgccattagaatttagtgttaaaaaatactttaaatataacagcaccactttttgttatagtaaaaatgtatgtctttactcgattgtaattacctcaacacccagcttttgttgttattttgcccttggacttaggtatttctgttcctctggcttagaatgtccttccccttcatcttcctaatcaacctactcattccttacgactcaactcatgtatcatctcctccagaaaaagctttctctgccacgtgtttcttccctctacctgacatccttgtgcgtaatacctccacctttccatattgtactataattatctattttgcatctgtctttctgtggaaggtctgttgcatattcatctaggaacttggtaaatgtctgatgataagcatttgattttttcctagttgattcctcaaataataataatgattaccctttaatctgaatgctcacaggtgtacttctatctcatattctatgcgcagtcatctgttaagctaatggctaattgtaccagagggtctcaactttgtttctttgatctgcattggtttatggtggtaccttgcccattcttggcacagcaggtggataaaaacaatgagtaacattgagaaaggctaatgtgtcttattgacagtagtggtataatgtttaccaaacccaaattgaaattattttggtttcttaaaatcttttcccgatagcccatttattttaatgttctgaatttccaagatctgtgtataggttcaatgattagtctttactgaagacttatctatggactgagtgtgtattataaatctagtgacataagtttaaaacttattcctttttcattttccaagtaaacttttttagtaatgtgtttttctttgtaaagacaggcagtatatgatttaggtctggatctggtttccagtcttggctccatcatgtattggttatttggccttgaacacaaatgacttgccttgaacacaaatgacttatatctgtgagattcaatagcttcatcagtaaaatggggatagtagtagtactgaattttcatgattataatgaaaattaattgagagactgatctggagaggtgccatactacaaagaggattaagtggaggtgtccctattaaatggcgagatacccagaaacattaccctgttgactccagtatgctggcaacgaggctttatagtctttgggaaggagactggaagattcttctctgggaaaaatgtacacatactgacctttgaaggacccccagtaatcagccaggtcttacctgatcatcctatagtgaagccccccgacacagtatttccattcatagtttagctcttaaatgtgaattagctatccagcaatcaccagacacttgaggaaagcctccagaaaacaaattggaaaaaggggcaagtcataggaaacagacaaaacaaggaacagaagaaaacatcatttttgcaatctataatattcacaagtttgttttttgagacagagtctcactttgtcacccaggcaggagtgcagtggtgccatctcggctcactccagcctcaaactccttggctcaagcgatctgctcacctcaggctcccaggtacctgggacgacaggcatttgccaccacacccggctaattttggtatttttgttgagatgaggtttcgccatgttacctagacaagtctcaaactcctgggctcaagtgatctgtccatctcagcctcccaaagtgctgggattacaggtgtgagccaccggcctcagagatctaaaacaagatattgtattttaattgcacaggatgcaattaaaaaagaaaacattcagaaaacaagaagagctcttagaactgaaaaataagttagtgtaaaggttggaagataaaattgatactaacctgaaaagtattagaaagagaaagaaataaaaactaagagtaaataagaaaattagaagattagtcctagagaatcagtatccaactaagaggttcccagtgggtgatacagagaaaatgaatgggaggaaatctcaaggaaatgtatttcctagaactgaatgattggaatttccagtttagaaagaaggaatctagtgccagcaaaatgagtatagaaagaaccatcttaggatatgtagttttcaaattgcagaacataggaatgaagaaaagattctgaaagttttgtattaaaaaggttagaaacaaaagatcaaagatcagatagcatttgtcttttagccttcagtgccttcaaaattgtgagaaaaaaattatttctaacctttttatttatttatttatttttttgagatggagtttcgctcttgttgcccaggctggagtgcaatggcgtgatcttggctcggctcactgcaacttctgactcttgggttcaagcattctcctacctcaacctcccaagtagctgggattacaggcacgtgtcaccatgcccagctaattttgtatttttagtagagatggggtttcgccatgttggtcaggctggtctcaaactcctgaacctcaggtgatccacctgcctcggcctcccacagcactggaattataggcatgagccaccacacctggcctctaaccttattttttacaactagccaaactattaagacaaaggatacaatagtaaggctagaataaaggtatttccagacatgcaaggtctttaaaattttacctccctcactctttctgaggaagcttttgggtacatgcagcatagacaggggaatagatgaggaaaaggaaggctgggatacagggaatctaacagaagagagaggaaagctccagaactacagctgtgccccaggcctagagagtcaccgcttcagattgaactgtgaacacacaggactcctggaggggaatttcttcaagaacacaactttaaactatgtaatgtgtttgaacatactgaaaggagacttgtgattgttttagagacaaacttgtgataagtacctggtaaactaagcaaaggggaaaaaggcaattaactccagtaaaacaaaatgttgtccaagaaaggaaattgaatagtactctgcatggcctagctgtaaaccacatttgtataaacataataaatactgaatatagatttaactaaagactgtgaaataactgtatcggaaggatgtaaaaaggggcatgtggtgggggaaggggggtagtgcaaaattaataataaatccccatcttccatggtaggaagttagtaaatcatatttaaagctgaaaacaaaaatctaaaaccagtaatgtaacattattatttgaagataaggaagtaaatataagaagaaaagccaagagaattgaaaatggttgcctttgaagaaagggaactgagaatggtagcataagcctggcatagtttttaaactttttttaaaaaaatattttggggttaaaagtaaaaatgaaaaatattaaatgtgacaattatggaaagcactttagcccatgccttttacagttcagtgttgcataaatataaactcttattaccctgctccttctaaaaagtgtactaaagccttgtaaagccagcgccacatactttctattcatttcatcttttttccccaattcccaccatacatgtgccatgttggctctgaggaaggaattacatacatacacgtcagtatctttccatttgtttgtgtatcttcttgatttactaatccattgttttattgatgtgaatgagaaggagctgttcacatgttgccactttctgaatcatgtggttggtaccttttttcaggattttcaggaaaatcctgaattgttttcttctgttttgcctaatcatttgcatcggcaagattaaataaaagtcttttgcaaattgtgttcaagcttactgtagtttcctaattagtcttattatgtacattttaacacattttctccctatgatcagggccgcaagcttcttatcattgggaccactagccgcaaagatgtccttcaggagatggaaatgcttaacgctttcagcaccaccatccacgtgcccaacattgccacaggagagcagctgttggaagctttggaggtaaaaatgagtcaatggattgcacactgtttataagaaaggaattgaggctgaaataagtagtaccacattatacctggtgtttggtttttatgctaatctggaacatgggacccggggatattacaggttgtatataccttatccaaaatgcctgggactaggccaggcacggtggcttatgcctgtaatcccagcactttgggaggacggggcaggtggatcacttgaggtcaggagttcgagaccagcctggccaacatggtgaaaccctgtctctactaaaaatacaaaaattagctgggcatggtggtgggcacctgtagttccagctactcaggaggctgaagcaggagaatctcttgaacccaggaggcggaggttgcagtgagccaagattgtgccactgcactccagtctgggtgagggagcaaaactctaacaacaacaaaaaatgcctaggaccagaagtgtttcagatttcagattttttcagattttggaatattgcattatatttaggttgagcgtctctaatctggaaatctgaaatgcttcagtgagcatttcctttgaatgtcatgttggcactcagaaagtttccaattttggagcattttagatttcagacttttggattagggatactcaacctgtacctccagttgttttcaggaattagagaagaaagatgaatatacatgacagtgagttaatttcccattcctcaatgtaggcagctacaaactgccaggaattaattgctctgtatccagcatgagtgatgtatatagattacttggaccagaaacttgaatgggtggtggtgtgggggtaaggtaatcactgtatagaaaaattaaccattcatagtggcttttagcacatttccttgcatttaataagttggaacaatgattaaagccttagaaatgtcaaaaaaaaaaaagctacagaagtaaaaggaactttattaacaagtttagaaatagaaatgttttcttaattttttgaaaatgacagtcatttttaaaaaagaacgttcttcatttaacttttaatatcaatattcacaagtaacttggtgagctctattggaaaatattatctactgagttgttcagcagtggtggagtcagtaaagcttcttaaagtcctcaaggcccccaacaaaattgaaatttatctatatgataaatgttttcaggttacccatgtagacagcttttgtgcagaagctgggtaagagaattaaaggagtttgctttgacacatacagattgttcctagaaaagaatgttaaaaattttaacttatatttattatggattggagctatttttttccccagaaaatataagttacatagcggtccataagaaaacagggtttaagataccagttttcactttcatgattgcacctaatgggtttaggatggtgaaggtcagactggattttaaagtaggagagaattctatcaacttgaacagttaggtagttcttatcactcttcttttaaaggtaaatagaattaaccaatgttgatgtgttcactgtaaaagtgctttgattattgtttattgtttttgtagcttttgggcaacttcaaggataaggaacgcaccacaattgcacagcaagtcaaagggaagaaggtctggataggaatcaagaagttactaatgctgatcgagatgtccctacaggtaaggtacttcgttctccgtatgactcagacagaacaaagcttcaggacacaccaagagggttcagtatttcctttgccaaggttttaattaatttaagttttgattttcttatattatttccaaacttaatttggtattagtagcctgcttctgagattgatcacttaacaatactttttaacttcttaaaattcaaaaatggaaggaaagattataaagttagttttcatttagggagccactaggtcttagaactagaaaagacttcaaagagcagtcgttcttctgccccctcattttggagataaggatactatgtgagccacaggctgtcagtgaattatccaagatcacatcaccaggttattgatggagaagggatggtgttgcacctcaagtcagtaagcgactgcacatataccaaacggtgtctgggagactgctttaagggacaagttaattaagttgtgcagtctagacttgggatctgtatatttgtccctggctgggctcctagaaatttcatgcaaactactgtagggttgaagcatccagaatcacatagaaaactgagccccagggtgctgcctgggcaaagacagatgaaacttctttgggactttctcatatctcctggcaacttacctttcttcattttagaactccacccttccatgtgcccatgctgtgtcttcttgtccttatctgacatactaggtagctgataaatacctccctatcaagccctatgagttcagagaccttggctcttactattgagtccacagcccctggaacagagccaacacatatgaaggtgctcagtaaacttttattattattattattattttgagacagggtctcgctctgtctcccaggccggaatgcagtgccatgatcatggcttactgcagttttgacctcgcaggctcaggcgttcctcccgtctcagcctcccaagtagctgggactaccagcgtgtgctaccacactcaactaatttttgtattttttgtagaaacatggtttcactatgttgcccaggctggtcttgaactcccgagctcaagtaatccgtctgcctcagcctcccagagtgctgggattacaggcatgcaccactatgcctggccctcggtaactttttttctttttttttcttttgagacggagtctcgctctgttgcccaggcttgagtagtggcatgatctcggctcactgcagcttccacctcccgggttcaagggattctcctgcctcggcctcctgagtagctgggattacaggcgcccacccaccatgcctggctaattttttgtatttttagtagagatggggtttcaccatgttggccaagccggtctcgatctactgacctcaggtgatctgcccgcctcggcctcccaaaatgttgggattacaggtgtgagccactgcgcccggccagtaaacttctgttggatgaataactgtaaattcattttacagttaggtaaatggacagagtggctgtattctaggcatcatgtgttactaggtgttactaggtccatctaggtggacagagtggctgtattctaggcatcatgtgttacttactgatggtcctgcattctgctagtgtgggcagtgagcggcagaggtgaagtttctgtttcacagttacatctgaaataggctcttggaccaataacaaattggaaacgtgaagtgaatgctttttaatcttttctggtaaatttatctgaaaataaaatttttttgactttcagaaatctaatttaatctactgagctttcagatggactatttttaagtcaattaatttattttccattatgagccataaattaaagtcacagactaaccactttgtttagacttattcttggtaaaagtgcaaatacaggtgtattggctctttccttgaaaaaaagataaatctgtcagattgtcagcttctttttttttaagtttcagtataattttttttcaataattgcatagaagaaactatgtggattttttccccaaccctcatccctttcccttcctttgatgcctgcaggtcagtgatcaagttaatgcttcttatgcatgtgggatagagagtgagagtggggcactcaggcctgatcttcagcgactgacatttcataggcctctgagtttgaaccccttcatgtcaaatggatttcgtgcagctgagtgaattctctttagatctgccttagagaggctgaacctaagtgaagaggcatgtagttttgcagaatataagtcgtggtacctctctgttcactacatgctattctgttaaaacttgcacagagctgaggatctgctctgactggatgtcacctgagggaataaagtcatttatctagattacttttttcctccctttctcctgacttttaattccatagctacaggcaagtcagtaagttgttgctcacacatattaaatatatttaatgggcaaagaactgcaagtaccaactacaactgcgctccagccagttctttttttttttttttttttaagaacttgacaattgattcatatgtaattctattcccaaaaaggaaaaatgtttcttttgttagctattcacactttttcttagtcctttgtagtctgacctcttacctttgatacatttgaaacttctgttcagtgtttttctgggatagaagaaatcttaaaaaaaaaagaaagaaaagaaaaaaaaatccgtggttggagtgggagtccaattgcacatctccccacagctgcactgagcatttgaaagttattcctggagggcagggagttccctcttgggaaacagactcctgctctgaaacatattttaaaagttaggtgtgtttcttacaataaaaattcatcttcaggaactaaagatgtttttaacgattgttttctagataacttcatatctcctgtgggcctacgagaataaagtacatttaacgagttagtataaatatgaatagaaaatgaaaaccagtcgagatagctaataataacgacctgaacgaagcacctgaaacaaagttgcgccatcttttcttagactcatgacacattcgcagtcacaggagacccagattcatctggagatgatttcaggaatcagcagtactcttcatttttttagttttagcacaactttgttactacaaagaagaaactatatgacggatactgaggctaagaaaagctacatggttggttatgtagagttaataagctattttttagttgttgaattaacctcaacttggtatcttctactttgctgtgactttagtagccttttacaccttcaacaggtgaattggttgtcatttgaactctgatgaatggccctgtccagtctcacagcgatgcctcacaggcatcagcacagggcacgcctggcccaagtgcctatgatggccagcgggcttgggtcttttggaacccagtgtacatagttctggaaaaccccattcacttcctccaaatgatgtgatctgctttgttttgtgtgagaatgctggtcaaggagcaggtaacacattcagtgacctagcagagcattgatgaagtgtgaaaccgaacactgccttctcatgaagcaagtgcagagttgttagaaggtaccattaacccatcttcatttcttctgatgtatttagatggatcctgaataccgtgtgagaaaattcttggccctcttaagagaagaaggagcgtaagtacatacaacatttaatgaccatcaaccaaacttaccaccctgttaaatccctgtgcctattctaagagttgctttcctagataagtttgtttccatttatttgaattcttcgctgtgttgtaggtccgagagaccaagcaaggaagttggttgtactgttggtttgctctccctgtcctgcttcgcaaaacttccttgtcacaatgcaggaaaaacttaatggtacatatttattggaacctgcttttacatgcatggagctgtgaccattttcttttgtgaagtgctcatctaatagcaaatgcatagtgggaaatgtaggataaccattaagaagcttttagtgatttttttttttttttttttgatgaatagttttttacggaccctcatctgtttttttgtgttttggtatttcttttgcagtagcccccttgattttgattgaaaatgaactatttgaaacacacagtgaccaagggaagtgaccaaggtgaagatggcctaggatcttcactgtcttactcaagatactggactaagtggaacgttctctaccttcaacatgtgctcgctctgcatgattagtgcaataaaactcccttccttatgcatactgagatagcttagtgtctcgtggaaggtgtcaatttggtttagaatgctgcgcttaccttcccatgcaggctaaagtgattccttcttgctcagtccctctgggtgggaaccatccagtacttgtggacactacacgtttcaacctctctactagcaccatcacccttgaaaactctcagtcagtgtcatgaatgttgcatgacaacagttggccgattagaaggcagactttctacatgcaaatctggcttagtaaatcgaggtgtgggccagagatcctctgacagctgtcctgagctaacactaaaagtcactgggtatttggttaaaggtctcccacaagactggtattctctttgcctgaagaaacaaggcattgaatctctaaaatgctgttctcaatcattgtcagagatgttttcaagttgcagtcagaagatctttcttaatagaaagtcagatgactaccgtgttggttgtgacttccccttaagtataactaatttgctctgtggtaagagatatgctcattattaccacttagaagatgttgttaaaaacatgtgaaagataggtatggaaaaagcatacacccccaaacagaaaggagttattaaagtaatttacaaacctctcagcactaattagtgtccaactccaagtgggtcaattccttagtataatattaaggcttactagtatcactgctttttccttagcttaatgacttacttagaatttatcctttattttaaatgatctgtactatctagtgtctaaaacactattctccagaaaaatcaatcattttctagccctctccctcagtcctttattgtccattccaatacattgaacacatttcctttaccctccacacacttcttccaaaaggaagcacccgttgagtccttttgagggtgatttgtcttacaactgactgacttagcaggaatttaattaggtcatatttggtgatgagacttatggagtgtgcctctctctcccaactgctgcttaaaatgcaaggacaagcaattagaagccatcctaaggtgcttacctcacacgccacccatgaggcttgtggccacagtggcacttgggtgtggctcctctgttatttgtcctcatgtgagaaagcagatcatctccaaatcttgccatttgtatacttttggtggagacttggatgtcatatcttctttgttttgggttttcttccctagcttattttgtggcttttaaagaagtggattgtattgtgagatcctgtgattcctggtggccagtatcctggattcctctaagatcttgcctctttcctcctcatgaaagcagcacacattgtgttaacttatgtctcttgttaaatgagcttaatgtctttgtgttttgtccaaaactgtattgaaaaaatattgtttaatgcaaatgaaggaatgcaataaagagtaaatatacttgaaaatgttctgtagaccagtgtttcatatagaacgacatgaacagctgataggaatggaggaagaaggagggggctcaggaaagaaacctctccgtgttttgttacaagtagcataacatgagggatgatttttattttaaaaatctcttatttagaaagtatagttatttaaaaacatcattagagtatcagaaaaagttaatatacaaccatctttatgctttatacttattttatcttactaaaaaaaaaaaatgcctggcacggtggctcatgcctgtaatccgagagggaggctgaggtgggtggatcacttgaggtcagtagttcaaaaccagcctggccaacatggtgaaaccctgtctctactaaaaatgcaaaaaacagccgggtgtggtggcacatgcctataatcccagctactcaggaggctgaggcaggagaattgcttgaacctgggaggcagaggttgcagtgagccaggatcacgccacttgcactcagcctgggcaacagagcaatactttgtctcagaaaaagaaaaaaaaaaaatcaactcaggtacctaagccacaaacaaggttagtaataaaccagaaaggagggttgccactcaattagaattactcctttctgtgaaatgtacaaaccaaggaacttcaaggctctcagtgagattgcttcacatggttcacttttgtatcctccatagttttttacatttttctgagctatcagatctcttaacctcctaaaccttgatccttagcattggctcagtttaggacaggaggcagctcagaaagtccacaaggccctgtggggaagaggccagcttcaagaacttccacaacgggagttcctgggaggaggaccctgaggccgacctggtccctgcatagccttgagaaggtgggttcttgaagctgcccaaatattcttcaaagccagtgctgtacagcagagcgtatgagattacagaacggcctgtgaagaagcaaaggaggctccagctagctgctgccttaggtttcttcatctataggcgaattgttaaccggctatttttttgtcataagatgtttttgagatcaaaacctcaaaagaggaggttattttatcctttctaaatttgtacatcttcactgggacactttttttcaatgtcacacagaaaaattgcataattgtggttaaagtcagaaatatgtttttactttaaggctgtcttttcatatcctaaaaattgcagcctcccctttaaaagtttcagcaacaagtcacaaaatcatggagtagattgaagtgtgtacaataatcaaatcctgatcaacagacttgttgaaacagtgagtcagctataaacaaacaccccagcccaaacacagaaggtgaaagcaggatttcattttccttgcctgacaacttggtccatagcctctttaaagaagtgactgggggcagccgggcgcagtagctcacacttgtaatcccagagctttgggaggctgaggcgggcaatcacctgaggtcaggagttcgacgccagcctgaccaacgtggtgaaacaccgtctctactaaaaatacacaattagccgggcatggtggcacatgcctgtaatctcagctacttgggaggatgaggcaggagaattgcttgaacctgggaggcagaggttgcagtgagccaagatcacaccactgcactccagcctgggcaacgagcaaaactcttgtctcgaaaaataaaataagtgactggggaagggtgtgtatgagagttcaagaaagcaggtaagttgcagaatttattgcaaaatgatgtagagtttctcatcagctggcaagccgtactgagactgggtcctggagacgagcccacaagggtgtgtgctggacgggcaccatggcataaagatgcgggagatagcgcctgtgattggcaagcatcccaagtgggtgaagacaaaatatccaaggagggatcatgtttgaaattttcccagcgtagacgccatgcaacttctgtctcactattttgggagtataagattaatggtaagaaatttttgcctcctagaaggttctctattaaactaggagaaacagtggcagtgtagcagcaatgcgtagctgcactgacttcactcgagtgtgcagaccagccacacacacaagaacatgtccctatgcccagggccaccaggggagacggcattaggtaacaccaagaatcatgtcgccatcatgtttccttgcttttctttttccctaccttctttccttccacctttctttgtacctcatcccctcatccttgaactgtctcacatgctttccttcccttctttcttcataaaataatattgctttgaaagatatcttctaattatgtcgtctctttcagatttttaaacaacgtcctcttgtgtttagacgtttgtaagtacttatacataaggagaaactacatgttcaagcacagctatcaactgtattctccttaaccatcaaataagactgggcagggtgtgatggctcacccagtaatcccaacactttgggaggctgaagtgggaggaccccctgaacccaggagtttgagaccagtgggcaacacagcaagaccccatctctacaaaagattttatttttaattaccatagtagagtgcgcctgagtcctagttacttgggaggctgaggaggatcatttgagcccagggggtcaaggctgtgttgagccatgatcatgccactgtactcctgagtgacatagacacttgtctcttaaaaattaaaaactaatcatacgattacaaatggtcttcattagtatgaatagggaccatttaaatatttggcaatcttattgattgaaaaagtactggccaggcagggtggctcatgcctgtagtcccaatgctgagaggctgaggtgggagatcatttgaggctaggagttcaagaccagcctgagcaacatagcaagacctcatctctaaaaaaaaaaaattaaaaaattagctgggcatggtgacacatgcctatggtcccagctacacgggagcctgaggtaggaggtcacttgagcccaggaggtcaaggctgcagtgagccatgatcacaccactgtactccagcctgggcaacagaggaagaccctatctcaaaaaaaaaaaaaaaaagaaaaaaaaaggaaaaagtacctagaattctgggatagataagttcagtcgagcatccctaatctaaaaatccaaaatctgaaatgctctaaaatctaaaacttttcagcaccgacaggatgccacaagtggaaaattccacacctgaccttgtgtgacaggtggcaatcaaaattcaaaatgcagtctaaactgtttcatgcacaaaattatttaaaaatttcataaaattaccttcaggctatgtgtgtaaggtgcatatgaaatcaatgaatttcgtgtttagacttgggtcccatccccaagatacctcattgtatatatgcaaatcttccaaagtctgaaatatttctggtcccaagcatttcagaaaaggtgtagtcaacctgcattagctttatgcaaaagaaaaataaaaagtcgaaatgaaataaaaatgaccagactgtaagatgtagaggagatctgtatcctgtacgtgtccgattcgttgtatggctgaagtgtaacagtttttgtggtttcagcttttcaggggctaaagacacatcatggacaaaacagagtgcatcaacttctggtggctattcctaacctcaggtcacaggtctgaatacagcgcagagcagcccgcctccaccataggcggctcatggctttattttcctggtttttttttgtttgtttttttttttttttgagatggagtctcgccttgtcacccaggctggagtacagtggtgcgatctcagctcattgcaacctccgcctcccaggttcaagtgattctcctgcctcagcctctcaagtagctgggactacaggcatgcaccaccatgcccagctgctaatttttgtatttttagtaaaaacgggctttcaccatgttggccaagctggtctcgaactcctgacctcaagtgatccacccacctcggcctcccaaagtgctgggattacaggtctgagccaccccacccagcctgttctcattatttctcttcgtagtgaggtaagatttgttcctaaatgaggtaggtcaggagaaataaaaagaaaaaacatttttgttattctctgaaataatgtgctgaataaaccaaaggtgacattttatgggtaggtctgaaaactaaaggattgtctgttgtcataaaaccaacttgtggcatctcattgttgagaaggcataacctgtgagcttccagtgggtcctgtgaagtggcgatctgagagggtgcccatccccagagcatgcccactggcaggccctttctacccaaacccaaacccaacttcaaatgacaattgttccagacagcccacagcccagggcacacgctttcttcttgtagaccagcctacctccctctacggcttagctctcacagtggagctagcaggggacagacaattttcagtcaagtttcattttcaatagagaaaatcctattttcccattaaatggagttgaaaacgtggtgaggaggggattaaggcagtggccacccctgcggtctgctggccttgggccacatcttttaggagtgcctgtgacattaatttatacattgaaaatacttgagtctgtgaaatgaattagtacacaagttgttgttttctaaaactggaaattcattgttagaagttaacttagaacaaaagaagcctttaaaaatgtactgtggtgtatcagacccactgtccgtgacatctctgatgatcttgcttagaaaacagaggaaataaccttcacttggtcatttaattagctgaggccaccatgttcagaatctcgtatccttgacctcctgagcattaatctggaaactccacacagtgtacaatgtatccattttaggtttgtttaccttctctttaatgacttaacagaaaaaaactgcatgatgaaatatattttctccaaatatatatatatttatataatatataatcttagttaactcaaaggtatatacattgtataataaataatatttataaaaagagactttttgaatataaaatcaaaaagatcaacaacttctacaactttttacaaaactttggatacagcaggttggtaggaaatttcggttggatactattacctgactacggcgagaatcattacaatgcactcatgtactattattaaataattacttgtcagctacttgaatacgccccagaaacatgactttatcacttttaatatagaatacatagatatgaaaagattgttttgaaaattcgtatccattctgctgaagtattctcacataaagcaagtattatccagttgacatgatttaaaacttttcagtctaaggtgagatggggaggggcatttcagacttggcggagggggtgagatgtgtatctttagcagggcttgtggccagcagatttagaagtgaaggcgggctcctggacgaccatcttggcaagcccacctgcaccagctgggagatcgctgccctggtattttaggtcagggttaggtagaccccagagagaagggggagaaagaaaaatctttgttctgctcattcccctgctgcatctcttctttctgattctccctaagacagttgttgaaccaattcatactgtgaaatccatgtgcctcccttttgctagctttctctaggacgctcagctggaccagtatgcctcagggagaactcagccgtgagatgcttcacctaagggagtaggtgactgctggttcccctttgaacttctaatccagatccttgggaactgcatggatggaagctatctcagcatgcaggtgagggaggaagagctgggggaaagaactctgtgtctgtgtttactcacattggccccagagaggaaaggacacagtaagatgggtccgtattggagaggaagcaaagggatggttttcatcctccccatctgctagtcacaaagttggaatttcaggaattgatggctactccctcacggaccctttgtctaacttatactaaggtgacctggagtccaactgctctacctggagttatttgtacagagaatctgcaggtgagcagggctgggaaggactgaatggccccttctgaagataccgcttatttatttaggaagccatttgagctagagaagacttgcccccttacatagcctatttacaaggtccactaccaccaaaaaaaaaaaaaaacaaaaaaacaaaaaaaaaactgcattgacggtggaaactgcagaatggtagaaaaagattttgagatctgactgcccctcgtgcagaacagggttatagagaaaatgagactgagaagaacacatggctgctcttcaaacggctgaccaggccaccctgagctgccagttcttccaaactccaaatcctactctaacaactgccacggaccttcctaccacttcatcctagctaaacctatggcttttatcagaatgagaaattagctcaaatttgaatgggagtggaccaagaaaaggagactgcaggggtgtgtcctacttcctgactcccaccctccaggcgtcttggaatgtcaccagaagcagcagtttggaaacagaaccttgcccatgctgatgtcttgactgccaggctgagagctcacattagcccagcctgttctgttggagtcaaattttttttcatttttattttctttaacatgtgcaaagataagcctcaggtctgttcctatcagaccctagagaactaaaaagaaagcccccttctttaaaaaccacacaccatccagagtagggtgagaaatgtaagatgagagagagggagagcctccccgtccacaggcgagttgggtctgggtcatttaccacgcgtgcggctggtgacagttccttgctgtctgacgctgagggctgtgcccggctctaggtcctgcttcccatgagacttcgctgaatccgcccagccacacacttcaccccttcccagcgcccttggggaaaatcaagaggaagaattagaaacataattccattcccagagaccacccattggggttcaaagatcagaggctgctgatggatctgaacgtgtccctggtgctcagaggtgatgaggacttgggtggtttctccacgctctcctctgtgctttgggcctgctgttgagggaggtcgtatgagtcacaggagcagtaaggctttcgagtccacagaatgggatcgaaattctacctcccccacctctagctgagggccttgggcaacaggaagcccaggagcaggtcactcaggatgggagaaacggtgcctggccgagggcccagtccccaactccaagtcaactgctgtgctgggctcacgccaggcatgcactgtgtttttgtaccgcaccaaatagcttgataatgagctgtccaaatgggagagagcctacttaattacgaacaattccttcccattggagcagcagtgtgttcattttactcatttgcatagtcatatctcacaaagggtttgaggcattcccagtcaacccccagctcttctagggggctgacaaggccaagataagactactttacagaggcagaaacaggctcagccagattgaagggacacatccaaggtctctcagcaaggcagtaacagatccaggacttgggcgcagccaggccactcgactcttgccagaacctttccagctccagctcaccatgttcacaacagcagagtgacgaggaataaatctggcacttgtaaggcaccaaatcaatggttagccagagacactgggtaaaagctacaaaaagctacagaaaaggtgttttccccacaaaggaaggacacaagccatttgacaggcgctctctcctcaccgtgtggagggcccggggcctgctctgcgactcccttctctctcctgcctgcactgccaagactgtcagggaagacaagagaacagctaacgactctgtcccctgccatccctgccagtgcatcccgcaggctcccgtcttgcctagcggagtctcggccgagcctgggcccattgctccagagcaggcggctctcgcctggggaggtggctctgggaggtcagctctgcttggcccaggagcctctgtggctgccctgtgagcagctgggtcctgggccaggcccttcatgtgcagggtctccagtccacaggacaaccctacacagaacacagttctcatccccagttcacaaatgaagaagccagggctcagcgaggcagaagagctggcctgggagtgtttatcagaagggcaccatgttgggagagtgtcctccactggtcacagagtgaggcctccagagcttccacagagaaggggttccgggtaggaaccacttggacacagcatcttgaaaccatatctatgtagcactttacataagattgaggaaaaaaaacactcattgtccatttcagaaatggggagaaagagggctgatgaagagtactgattctggccgggcgcggtggctcacgcctgtaatcccagcactttgaggggccaagacgggtggatcacttgaggtcaggagttcaagaccagcctggccagcatggcgaaacccgtctctactaaaaataaaaaaattagccgatcgtggtggcgggcacctataatcccagctactcgggaggctgaggcaggagaatcgcttgaacccaggtggcggaggttacagtgagccgagattgcgcacttcactccagcctgggcgacaaagagagactcagtctcaaaaaaaaaaaaaaagttctgctgggctcccattgtcaccaccactgaacagaggaggaaactggcgctcccaggccagacagctgagtggacgagtggaggcgctggattcaccttcgtcctctcccactccccacactgcttttgttcagataccgacaaaggtagtgccacctgctgcctttctggactgtccccaccaggacagaacttgagctacaccgaggggcttcctagatgggctgagtgagtcgcccctcagccagagctcttctccatgacgtcaagtacctcccatatctcagagaggcccgtccacttccctcccctactccctatggcacagacatgtgccagtagctcagaggtgccctgtggaactgcaggaagagggggcactctaccctttcacaggctgctctcgcccagcagcaccccagacaacaatgacccagcagggaagtgcttcccaattaaccaagccctgtcctcggtgtcctttcatttgtccctcacagcatctctggggaggatgacagatgaggaaccaggtctatgaagaatttcttgcttgggtcacacggttggcaagtggtaggagctggagcagggcagggcctaattccaacacccatgctcatgcctcgacacactaggctccttctcaggggacagaaaaggaagaaagggcaccccagccttaaaaccttccaccccgggggtccaggaccactcctcatccatgctgacctatcccggggtgctgtggaacccagggccagtgcatagcgcctcccatgcaggccacctctgggaagcttgggaacaaaatccacccgcctttgatccctcgattactcatcccagccactctgaacttgaatccctcctgctccccgtcatcatccataaactcggtgagagtgctccccactccacccaagcttcagatctgtcaggatatgggcttatatgccgcttccccccacccacctccctgaggttggtacgatttatgcttgtgcaggaacttgccctctaagttcaaggtggatgcacactgactctgcctcaggggtagaggagacattttggctcgctgcttgaggtatttaaactgccccctgcccttcaccaccatcaccactttatagtaagaaagctgaggcccagaaaagtgaaagaacaggaagttactgacaaagttaggaccagacgtcaggtctcccagcttccagccccccatctccaaataatgctcaagaatgacagctagcagctatgcaaaaatttgatctggctcataactaacttgtgtaaaaatgttaatcaattgctggcacctaatgtgcacacactgaattttgtttttttttgtttgtttgtttgtttgtttgagatggagtctcactctgtcgcccaggctggatggagtccagtggtgcaatctcagttcattgcaacctctgtcgcccaggttcaagcaatcctcctgcctcagcctcccaagcagctgggattacaggcacctgccacaacgcccggctaatttttgtagttttagtagagacgggtttcaccatgttggccaggccggtctcgaactcctgacctcaggtgatccgtccacctcggcctcccaaagtgctgggattacaggcgtgagccaccgcacccggccaacactgggtttttatctgtgctttgtgcaatccaccaagtctctgcccaaggaccattcccacggatgcttgaaaaatcctagcttcctattttggctgtgggaacttgtgtgtcttggatagcttagaaacagaagggggtcgtcaagaagacgagatgggcaaacaaccccattccctgcgcccaggctcccagcctcccccctgcttcccggagccctacctggtgccctacttgcaggtgtgcacgtcgtagatgcgaatacactcctggcagctgacgtagcagcaccagtggaagatgcagtggcatttttccttccgcttctccgtcctcgtgttgtggccccggccacagcagagcagatcgcagccatcgatgccgtgggaggtgacattgcaagtccggtcccttgtgccaaaggaacccgtctctgggttgggctcacaaaagttgggggagttctcgtagtagaccaggtccctctccgtgggtggcttgaagagcgagtacttggcccggagggtctccacccagcctcgggactcacggtgcttctctactaccatctccgaggcgctgtcatacttgtccttgaggaagtcaccgatggcacggaagtcaggctgcgcccaccagcaggtcttcacctcacagctgcccgacagcccgtggcacttgcatttgaggtgcatgtggtccaggatagtctgggggagagaagtggcagctggccaacagaccgaccccacgagggggcacatccaggccttccctctctgccactgcccacccccttccctccagccttctctactcctctgtgacaggaagagaactgatggggactgaggcaagacctaaagaatagtgaccatgtttccctcccccttcacaccccaagcatgggtagacagcacgtccacttctcacagcgcatgaaatacgagttgttgcccaggcgcggtggtaatcccagcaccttgggaggctgaggcgggaggatcacctgaagtcaggagtttgagaccagcctggccaacatggcgaaaccccgtctctactaaaaatacaaaaattagctggtgtggtggcggacgcctgtaatcccagctacttgggaggttgaggccggagaattgcttgaactcgggaggcggaggttgcagggacccaagatccagccactgcactccagcctgggcgactgagcgagactccgtctcaaaaaaaaaaaaaaaaagaaaagaaaaagaaaaaagaaataggagttatctccatttaacacatggggaaactgaggctgggaacttaacgtgactcaccctagatcatacaagcatagtaagggagtggaggctgaattcaaagccaggttcccaggacttgacagccctacaccgcgtgccaaggtgcacaggatgggtggtgggtggcacctgatcccacggggtggccatgctcccaggccgactcatcccgggtggggtggagtccaggaactgcccaaggaggaaggagggtggacagacgaagtggctgtggggtggggaggaggccaagcctggccaaggggaaaaggagcccgcgacccacagggctgccggaaggggtgaggtgggggccagggcagctccggaggggaagcggggggctgctccctgaagggtttggggagggtagccgggctcaccgtgcggcccgcctcgttgttgtgcttgttcatggccgagcgcgcgtccggcctgttctcgcgcgcatccgcgaactccctggacactaacacgccgaagtcagcgtcctcgctgcagccgccccacttccagccttcgccaggcggccccttatgatgcgagtcacagccgcaaatggtggaggtgccctcggcgcaggagcgggtgacggcgaaggccacgccggccgaggcgatggcgtgaacgaaggccgactcgcgggtggctgcggggaggtcgtggggaggcagcactcaggacccggcctgggagcgcctgccctgcctccacctcccaggccaggacgtgaggggaacgaggccaggaagagttgaagagctcaccagccctgaggcaagagggaggcagcttccccaccctctttggctggtttagacccagttgggtattcccacttcaccgatgagcaaactgaggccctgggctgctgattagctcaggacctcaaatgccacagggcaaagcagtgcctgttagaaacaggcgccgacaccaaacctctggcaggttgctgcagagataaggcagccacttctgtcctggtcccacaccccctgccctccaccttcccaaagtccagagaccaccctgcacaggcctgagccctcccacgcctgagtgagatccaggtctgtaaggagggaggcctgggaatctacagcctaaacctgcccaggcccaccccttccgcacgtggatgcatagggacggcccctctccttttctcggtctcagtcgccctttttgtaaaatggacacggcttccctccgctcctagagcccctcaccaggagggcagtggcccgtgcctcagtctccccatccccattctcctgccctcacgcccaggcacggccaactccctcccagaagggtagggacaccgggcagttcccctggttctgtcccagggtccagcgcagggaaaggagagactctcaagggtgtgctccagcctcctcacaacggtcatcgtctctgcatgtgcttcattcacatggaaagttttactcattttatagatgtggacattgacgattagggaggccaaggcctgcaagacctgcagcccaaccatctctctcctcatggcaggacccgggagccggaggtgactcgccacctgacacaggctgtgaaacgccgggccggcctagtcggcaaaattggtcataaatgtgaccaaatttatttagaagccaggcgcccgcctcccctcctgggctgtgggccgagtgctgcaagaaggaagcccgggacccctcttggctcccgcggccgctctccgcggcccccacgccctcctgcgccacctacagaggggcccgtcccacttccaacgacgggagggcgaagagtgcagagctggtcccgcccgcgccccgcgcctgcgctgccagggccgaccgaggacggcggcaagggggcccgacgtcccgcgtccagttgtgctcccggcctcggggtcccagccgcgccgctcactcgccccaatcctagacgccccagccctgggggcgcctcggggaagaggggccgagggcgggttcacagggcgggcgcccctcgtttccggccggcctgcggcctctcgcggcggcagcggcgcccgggccccgggccgcgctgggttcccagccccgggaacgcgggggcggcgggggcggggcggggattagcctgggagcggcgctgacagccccgctgtgccttccccgtccggcggggcccgctgggccgctcaatccgcctttgttcgcgcggtgtcacaccgcattacccgcataatgcggccgccgggcccgggccgccgggccggccgccaccgcgtagcaacgggcggctcccgcggccgggccgcgcccccggccccggcgccgggccgcgaaatccccattgaagcggcgccccccgcccccgcgccgcgccgcgccgcgccgcgccgaatggccagagggcgtgtgaatggcgcggcggccgcgcggtgggggggcggtgctcgggcgcttttcaggccgcccaggcccctccggcgcccgcccccgcccctgcccccgcccccgcctggggaagcgcctcgggcccgccgcgccgccgccgcgcctcgccccttccggccgccgaccccgccgcccccagactcgcggaagacgcgcgccccgggctgcccgacccgctgcgccccgggtctcaaagcgcggggcagagattaacccttggccgcccacgcggcggtggtgtggggactcgccgggggcggggtgcaaacgtggggccggagctgggcgcgaacctgggttcaaggtccgggctctgggcaccgaccggggcgcgtatgcgctcgcggcgtcttccgggatgctctcctcgccgccgccagcaaattcccaaactctcgggcacacatcgcccctccccccgcaacccaaacctgtcctcgggccatctagggaccggggcgtgtgccagaacctacggtggtgacttaaaacgttcaacgcggagtgaatgggtagcgctcccagagccgctttcccctggctcttggccggagacgggaagagcgatcagaggtgactcgcttttggggagcgcgtctagacgcagggttgtttgattcagcgctacctggcccgaggaggggcaccggaaagcgctgagaccaacacaccgacaagaacgagtttgaaatgcaaaccgccgccacttggccccaattaagaggccaaatcttttatgtcaacaaggaataattagttttggcaatagaagcgtaaacagaatcatcatccattgatttgctaattaccctcctgtcccatgacaatagccagcactttgcctgtaggtgggacagaccctgagcacctgaggcaccggtaaaggggaactgcactctaaaatgggggttgtcagcttcccccccaaccccacccagcaccccaccccttcacctgaacgtcagatcccttttctttctggctgtataggcagctctcattcattccctagcttctaataggagggagggccaggctcagcggtttgggtggcagagcaactctggctgtggccagcccggccaggatcgttaaattcctggacactgccgttccacaaagagctgcccatcttccacccagtccatgagcccccaagtccccttcttgggaggagttgtcccacttagcctccctcccagggcctgcaggttcaaagtcaaatcatgtggttccctgtccacttgaggcacagccagttagactcccaggctgcaagacggccggaaagttacccagaggccagtgcaccctctagccccaccatgattcctgggcatatccagctgacagggcatgaggatgaacagaaacctagaggggctcttgggggcaacgcaatgctaccacagcaccaggcagcttcctcacctactgaggactttctagatgggagggacctaggggtggcaatgctctcacccccaccccaaagcggtatttgcatagcacttaacacagcattggggaaatgtcacaaatgtccacagcaggagcctgaggcgcccactgtgcaaaagccaggaaggaagtctgtggccttcttggtgtcggccctcaaacctcaggatcctggagcatctcaaggcggcccagcccccagcagcgcctgggaaggtgtggcagtcatgcaaccaaatttatcaccctcccagagggaccctggcttcagagaagaggcaccctgactggggtggaagggcatacagtcctgatccctccccccacccagcccctccccccccctcagccccaaggcagtacctttgtcgaggacgggcccaaagatggccaggctgtcatctatggtggtgcagttccagcggcggccccggaactggtgctggcactcctggatgcccagcttcacgccctcggccacgctgggcatgatctcgatgtaattgcggcagaagcgcagttgcttggggaccaggcctgggatggagccgcagagcaggggctgtgagcccagagatgtgtactgctggcccagggccagggacctgcaggcagacagagggtagtaacactgtgggcacaaagcacagagcccatcctgggcaccatggccgctttgtgaaccctccggggtaggtggagaggcagagggcctgtgccctggcacctgaatgtgctacctttgacctcgggagcatgccgcccctcaaagcgcagagctctgacccacgcaagtcagccctctggctgcatccagcttgcagggggatgggaccgcagaagccgcttgtgggggcccttgggggcaatgcaaagccatgaaaagaggtttggactagaaagatggtatttggggcccagatccagtcctttccaggttctgggtccagcttccctgatgggcattgaagagatcaggctgggcaatttccaaggcagtccaggatactggggccacatggacacttccagtgactcatgggacacgcgcgcgcgcgcacacacacacactacccttggcaatgccctcagcctcttccctgcgatggtgccagcccagcccagagcctcccagtatctccccaaggaattgctggcttgcaccaagtcctttgtctaccagggcctccatgaccatctttccagtttcctagaagtttctagagctccacctcttttctcatgagagactggagcttggctttgtgtcaaaacaagtttagcacagagtcagaagggagatctcagatctcactgcccacacccaacaccaggtgactggtcaattcactccattcctctgcccctcgctttgtaatcaatatcccatcaactctctcaggttttatagtcaacaacagaaagaatgaccttatgggggtggggcagaagagtttaaaatactagaaaaccaaggtaggaattacgacttttccgttccctgccctcagcacaggaacagcagaaatgacattttctgggagaacctgagaaaatgatccgtgagtgtcagtggccttcaaggacaattgcaatctgctgtatgaccaggggcagtgtgagctggaagaaggggcccatctcctctccctctgtgtccagcactgaccaaggctttggtccagcattggcctaagtcaagtttcccacaaaaagtgatgggcaaaagcctcggaaagaggggccgggagaagaccccatggggcagggtgaggttttttgtgtgctttttagtacacaaaagcttctgggctggacacagggccgagccaaacatctgccatttggcaactgttactgcttgccaggcactttatatacaacatttctgatcaattcccaaacatgaagaacatcactatctcctggactaggaaactgaggtttagagagtgaattagcttgcctacggctttttggtctgtggtgggtcagagagtgccatgtgccttcccccgggtccctcctccatacttgagcttgatgttggccttggccaattcgtggagactccaaggcacagagctccctgggcaccgtgcaggggcatgctacccatccaccttggttgtctccaggctcagttgtcagggggagaggcaggttctcctttttccatttgtttattttgggtggaggaactgaggagccagatctgggagtttggatggtaacatctgtgaggcattccaggtcttaagcactgagctttttctaaagagaaagaagcagcagccagaagttcttttttttttttttttttttttgagacagagtctcgctgtgtcacccaggctggaatgcagtgacgtgatctcggctcactgcaagctccgcctcctgggttcacaccattctcctgcctcagcctcccgagtagctgggactacaggtgcccaccaccacgcccggctaattttttgtatttttagtagagacggggtttcaccatgttagccaggatggtctcgatctcctgacctcgtgatccacacacctcggcctcccaaagtgctgggattacaggcgcgagccaccacgcccggcccagaagttctgatttatcggtggtaatggctaattactgatttccccggtgcctggccctgagcagaggcttttccttgggtttgcctcatttaatcctcaaaatagccccagcacaaagtagggtcattattagccccattttacagatggcttagccttgcaggttgatgaagcagcccagaccacagagctcctatggaattgctggttggaacccagggtgtcagactccagagcccatgggggtcatcactatgtgaccctgcctgctgggcagtgcctgcctgggtcttcatggggtgaaggtggcttcaggcctggcccatctgcaccctgggcctccatactgagcacatgcctgagtgggtagagtcagtgagcccagagccctgatgggcacacggcgcacacagcactgcccctgccctgttagaagcaggttagagtgatcatataatccctgtggtttattatgggcctatcatgtgctggacacagttctgagtgcttgtgtctgttaccttatgtaatcctcacggcaggtctgtaataaaaacttcattatcatcgccattgtcccatttccaagatgaggaaactgaggccagggagctaagtaccctgccctgtctgccaggctgcagaggtccccgttgagcctccctctgggctcaggctgcccctcccgtgctcttaagcagcatctccagcccagccctgctgtgccagctgcccccacagccctgcaatcactggaggggaaactgagggagagttcagtgcagacaactcggccttgcaccatcctagatgggcagctcaggaacaagacccagggaagaagcctgggctgtccccgctccttcctctggtgtttgggacccagagccctatatgggaccactggagcggagagctgaggcgggagtgagaggcactcggagacccttcctctgccctcctccttcccctcccgttgccttcctgcctcctccttcctccccctctcccagcccttgcttgacaccttctgcaggcctgggcaccctcaagctaaactggaggctgagccctggtccagcagcagaacccacaggaggagccctaagggagcacaaagcccattatacagatgaaaaacagaggccgaccatgccaggtggctcacgcctgtaatcccagctacccagaaggctgaggcaggagaatcgcttgaacctgggaggtggaggttgttgtgagccaagatcatgccgctgcactccagcttgggcgacagagcgagacttcgtctcaaaaaaaaaaaagaaaaagaaaaagcagaggccgtgaaagaggaccaacttgtgcgaggtcacacagccatatccacagagaaagccaggccggctggcttgggggactgaggagtcggggggcccatgctggcaaggcggctcctcacccagctctccaaggggctccctgcttcctggtttcaccagttacctccctcagggtcccaggtgggtcttcgcagcccagcagagcacctgagctctggcacactgcctgcatggcttgattggcctcaaaggtcggagtgcttcccagacatctccaggaagaaggtgccactgagcccttcctgctgtgcagacgcagtctctcctctgccccacagggatttccttctgtccccacagttacccggatactggcaatactaatgacaactatttatgtagcacttgctctgtgccagtcacttcaaatacataatctcactgaatcctcacaacaactctgggaggtgggcattgttatccccattttgcagatgaggaaactgaggcatggagtagttgggcgacttatgcaaggaagtggctgagccagaattcaagccctgagtttgtctgactcccagtgtgatgtcctctgagaacaattcctgagcctcagtcatgatgagctgttttccctctttccaccaaaccctgtctccttcctgttgcccaggtcccaccaactgtggacctgggagccatggtgccagggtcccatccagctctaccacttcctagctgctgatctcagcaattttcttaacctctatacctcagtttctttatcggtaaaatagacacgacaggaggaataagtgacacaatccagtgcatggcacgtggggagcccttgctagatggtggttgctatggttacggtgtgtgtggagctgtccccagcactttgttccctgccttgtcaccaacctcatttctcccatccttgcatccctgacttggtagaacacatcagaaatctcagccccttcctatccaacactggaaaggatgcctggatcagacctcagtcctcacaggggtggcagaacaaagacagttgtgatctggatgagggttcaaggtcactcaaagagtgcaggcaaaaggacattttcaggatgctccattcaaaggcttcagttcagatggggtcatcctgcgagtaattagcaaggcctctggcgatggggcttagctcctgggccagtgtcggagactaaagaggctgtggccatgggattgatttctgcaggatggctgcccttccccaaacatgcccggccacccccaccctgagcctcctgcccgcacactgctgaaattccaccatcgcagacacattactttaactcgccactcctattccccattattgaagtacacgttccacttcgggaggcggcacagtgactctcatgctcctcgattctttgtgccaaagtgtgcgtggctttgacggatttgcctagccagctgaatgactccagcggggctgtttcacacttctgcacatttgcacatgctgagccctcggctcgaagcacctctccactgcccggcccccggcaaccattctacaccatcctttgaaacctgattcctaggtcaccaccattctaaagccttctgtgagctccagacagaagtcacctctcctccgcctgaatctttcctgtacctaattcaaaccttcttatcccaaagtgctgaactgatttgtttccaattccatctggctatgccagtctcagtctccaagaagagaggtagtggtagtgttttctccagttattccccggtccctaccccatcacacacacacacacacacacacacacacacacacacacacacacacacaccccagcccactcggccttccaaagggccgggcacatgctaggtattcatgattctggaggaaaggaatgaagaactcttccaaaggacgagcctgatgcccctcactcgccagacctcccggcatccggagcttccgcctacacacaggacaagactccttggttccgctgaggaagttcctacgtttaggatctgagatgatggccaggctcccaagggggatagagacctgcctggcactgacagctggtgagggggagggcggaggaccctgccaggccttcgcagctgggccaggggctatttatacccagctcctggcccggcccttcccttccctaggaccctgccaccctcctcctgaagccggctcatcctccactccgaccacccactgcccagctgggccgaggacacacacgggcagccaggcggatgggctgcgggtgccctgcacaacaggctgcttgtggaaactttggtgttgaccccttggagtgaaatatccctccacaaataggcaagacctaaaccttgtgcatggccttatctaactcccatccccaccccagttctgtgcctctaccctgataacgcctgctgtggccagagggctgcaggaggcctgcatggtgagcacaaggcagagaggacctttttttttctttttttgagacagaatcttgctctgttgcccgggctggagtacaaagcgtgatcttggctcactgcaacctctgcctcccaagttcaagtgattctcctgcctcggcctctcaagtagctgggataagaggcatgcgtcaccatgcccagctaatttttgtattttcagtagagacagggtttcgcaatattggccaggctggtctggaactcctgaccaagtgatccacctacctctgcctcccaaagtgctgggattacaggcgtaagccaccatgcctggccatagagaacatttttagagaacatttttaatcagtgaattcaggtcagcctggatgctgcattgacttacgcacctaacatatggtgagacacctaaaggcaccctgtacagtgcgtcctgcctgatctgacactggggttgttggcctcagatgctgccgtccacccagtgacggccaatcccctgctgatgggggtctgactgtgctgccagggacacccactgtgctgccagcacccactcccctgagtgatccattagggtaggcagtcctgcacccaaccaggtggcctcccaaatggaatcacacacaatctccctcctctcccctacatacagaacatatgaaaagagggccctgtccctcaaaaagttaaacatagaatcaccctataatccagcaatgccacacctggtatacgcccaaaagaattgaaaatggggactctgcccaggtgcggtggctcacgcttgtaatcccagcactttgggaggccgaggcgggaggatcacgaggtcaggagatcgagaccacggtgaaaccccgtctctactaaaaatacaaaaaattagccgggcgtggtggcaggcgcctgtagccccagctactcagagaggctgaggcaggagaatggcatgaacctgggaggcagagcttgcagtgagctgagatggcgccactgcgctccagcctgggtgacagagcaagactctgtttcaaaaaaaaaggaaagaaaatggggactccaacagacacctgtacaccagtgttcacggcagtgctactcacagcagccaaaaggtagagacaacccaagagtcctcagcagatgaatggataaacaacaggtggcccatacatacagtgggaccctattcagccagaaaaaggaaggaagcgggtgtggtggcggtaatgccagcattttgggaggctgaggcgggtggatcacctcaggtcaggagttcgagaccagcctggccaacatggtgaaaccccatctctactaaaatacaaaaattagccgggcctggtggtgcgtgcctgtagtcccagctactcaggaggctgagacaggagtattgcttgaacctgagaggcagaggttacagtgagccagttgcgccactgcactccagcttgggcgacagagcaagactctgtccccccaaccaaaaaaaaaaaaaggaatgaaattctgatgcttctgatgcaagctacaacgtagaggaaacttgaaaacaagctaagcgacagaagccagacacggaagaacaaatactgtatgatttcacttacatgaggttctaggtaaagacacgccagcttaggcaacagagtaagactctgtctcaaaaaaaaaaaaaggaatgaaattctgatgcaagctacaacatagaagaaacttgaaaacaagctaagcgacagcaaccagacacataaggacaaacactgtatgattccacttacatgaggtgtctaggtaaattcacagggacagaaagtagaacagaggttgccaggggttctggaagggagggagtgggaagttactgcttaataagtacagagtttgggatgatgaaaacagacggtggtgatggtcacacagcattggaatgtacttaatgccactgaatagtacactttaaaatggttaaatagcaaaattaaaaaaatcaaaggagggatggtgcttgcatccccagccttcaacttcgcatctagagcccctgtgcaggacgaaattccagagccccgggtctagtctaattccctcttcctctatacgggaagattgaggcccagagaggtttgtcattttccggggtcacacagctggctgcccaggaggtgggaggagaacccagggctcacagttcttttacccaccaggcttttaacctgggggtgatgaatgcacattctcagaagcttctctggggctgggcacaaaaaggacccacctggcttcacatgggtggagctgcagaaggtggacccaggggctgcggcccagggaaaggctcccctcctcccttcggtctcagggtgctctccagggccaagtctccccaagtcatgccttctttgcagaaataggccctttgcccttacctttctccatgcggaaatctaaccatctgtgccagcctcaaagggaaggcatcttaagactctgatctgaagatctagtgtctcttaaaatgactgacatggctgctgagagggagaggaggagggaaggtgaggagaaggagtcagaaatcacctctcctgtggtcatttttctctccctgtggtgggggccacggtgctcctgtcaaccccacaacaggccagggccaggtgctccacctgctggctcctgggcagtactggacagaggcccaacttgttcctgggcccagaagggctccaccctccacggaaacttctagaagggaaaggaaaggtttgaggaaagagcaggaagtgaggaaccaagcgttggctttggaactcaggcctctacctttccacttaggtcaagaagccgttcaggattggcagatgtcaggacaggaagcctagccagttcaggggcatgtgtgcacaccgtggggctgggcctggtgggctctgatgcacccaactacacccatagtgacgaggcaatcactgctgtggatgagggaggccacaggcctggactggagccgctcacctggctgcttggcagggagcttgtgacaaaaccagagaaacctagctcaggattccagctgccactgttcctcgccctcctggaacacatgtgcaccctgcgggtactgagcacaggtctggaccttcttgacatttcagtgcagggccaagggtagggggtttcttctgagcccaaagggactcaggtggggctgtgtcctgtggctgtgggagagcgccaaggtgcctcagggggtgcctttcatcaaagaagtgggacatgtctctgggccttgccattaggggctagttcattctctcaacggggctagttcattctctcaacggggccctctggctcgcctgcatctccagcaggggtgggagcacccttgcctatgtctaggacaggaagggaagggtgagggtagagtgggtgcaggccctgagctgggacccaaggtcttgagataaaaccatgaaggagcagctgcccgggctctaagcccagtgggctcctgtcttgatttagccccagctgtcaagactggggcctggtgatttgtggagtcagtggaagtgcctgtccttcagagagcaggttgaagtctggccttggtaaacaaagtcattcactgcctattcactcaacacgcacgaattgagtgatgactctcagcctggcagggttccaggttctgggaacgtggagattaatgaagccacacctgaggagcacccagcccaggaggctgctgtcagtaacagaccaacaagcatttcttgagcacctactaggtctgggcactgtgggtgccttaaatgagtgagacatggtcccaaggcacttgtaactttcagccccagtaacctctgggccagagggtgcacggtcagggcgagcgatctctaggaacgggggcaagtgtgtcctcactgcctctggagggctccatgtggagcagctaccgagctggagaaggatggctaggggccctcaggtggagccaggtggcagggggacagccccaggcaaggtggcatgcctccccaagccagggtctaggagccacacagagaagcagaggaggggaagcagctagaaaggggccctgagtgccagacattattcggacaaactagcaccttccttagctgggctttggaatatcatcctgttagttatgtgcaaaatgagacaagaggtgggtgctgggaaagcggctgggaggcggggttgacgtggatgctaaggagactctggggcctggggatccattgcaacctcccagggctcagctctcattgtgcagctgggccaagacccatgtgtctgggtcaccggggtctgtggcaggggatgggcccgctggtcatctcaggacagtggcttcaggaacagacaggaagctgtgaataaggactggtagccgtttggtcccatgagaaacaggaggaaggaggaaagtatggccaaagttttgagccaggatgaccaggaagatggagatggtgtccaccaagatgggaaggtaagaagcaaagcagctttgggaacaagacgaggaagtgcgtggggccagagggacttccaggcaccacgtagagacagagctgggcccaagagagggacggaagctagaaatccatctggggatgcttgtaaggagctaaaagttgaattatactttaggccccatcttggctgtgggcacacggtgggaggacactgagcgtcacggtgggagcattgatgccatatgccaaggggtggaggcaccagggagggggctgggggccaaggggcagccagcccagcttcagggcctgaacctcacactaggaggctggaaaggtgggctctcccgaaacctcagcccctgcccagccaacactggcagcaggcgcccaggtctggcttgtgttttccatattccggacgaggtccccacgagatgcacagccaacatacctacacagagggagccactgtgcccctacctcctctgcgctttcccctttttgcttttcttttttttttttttttgagatggagtctcgctctgtcgcccaggctggagtgcagtggcgcgatctcgggtcactgcaagctccacctcccgggttcacgccattctcctgcctcagcctcccgagtagctgggactacaggcacccgccaccatgcccggctaatttttttgtattttttagtagagacggggtttcactgtgttagccaggatggtctcgatctcctgacctcgtgatctgcccgccttggcctcccaaagtgctgggattacaggcgtgagccaccgtgcccggcctcccctttttgcttttcttatgatgcatcctaagccttcagtgcacagctgccttcccttggggacccctctctgaccacacagtgggacctcccagccctaaccatgctcctgttacaagctacaaagccagctcttccctgttgtcctgggatccaggttctgggtctatccctcacgttgcctcggcttaactctgagcctttgggctttggccagcccttcctggacctgtcaccctgcattgtgtcactaatgtcaccgtgagtgcagcaggaacagaaaggtgaggtctgggggtgactgagtggaaggggatatcccaggcagtgatccacgccataggagaaaaacccatgcacacggagaaaagataaccaaggaaaaagctattccttcccctccgacaggagcccccgaggacaggccccaggagccccggaaactcactagccctgctggccaaatgaccacttctacatgctgtggacgactttagcaactcccttctgcccgcagcttctgaaggttccctttcagggccacgaggggccttccgaggaggtggcacagctcagctgccagggaccacctgagagcccgggaggaccatggttctgggcagccgtggggagaaggaaagggtgcgggcaggagctcaaagccaagggtttggccacagactatacctcagtcagagggaagaggctgcgggccctgtgctccatcccagggagccctgtgggatgtttctttggggagaaaagggaagggagggaaggggtgtggagggcggggcagtgcctgggctggaatgttgcagcttctgttctccaaagcagctcctggagcgcctgcctgcggctctggctgatctgataagatgtgacaagaccgcctgaaaaatgttgaaacctgtaaaatgtttaaacctgttttttgttgtgttgtgagcatgaagtgctttttctttctttcttacccacccccccaccccttcatttcacaggaaagtgaagttgataagcctggaaaaagggaggagggtgcgagagagggattgttgccttcagccaaattgtggtccggggcatggagcagtctggtgggacctggggaggaggaaagagagtggaaacaggagggaagaggggacaagaggtgagaggagtcaagggtggaagaaggaggaggacaggagaagcgggggatggaggggtcctgcacccctggcctgctcagcagccccagcccatcctccccaggaccaaacacagtcccccacttggcaccccagaggaaccccagggctgtgggtctcttccttcaggcaggggattcacagggaagggcctaggcccagaggggtgtccagagacgggtaaaaggcagggacctcactcttcagaccccagagcgtctccctgagaggcaccaagcccacaggtgggcaagtgctgcctggtgaccacagaggggagcagctcccaaggacacatgctgagagctgggtccgtttctccactttgctgcgcagttcaggactcccaggtaaagcccagatgccctgtgcgtgctcaggtagggtcccagccctctgccttcagacacacaaaggggtgccgtgctctctgttactgaggatgtcatcaaggcccagaggcctacttggggtcacagcatttctgcccatcagttttgggtgattgtcatacagctccccctaaatgtctagtcttggcaactcaggggatgctgaacattctagaacattctagaaaccctggtgggcccaggtgtctctgggggtgctcatcagtacaaagatagatgttcagtaaaggccatttttcttttcttttttcttttttttttttttgagacagggtctcactctgtcacacaggctgcagtgcagtggcacaatcacagcttactgcagccttgaactacttggctcaaccagtccttccacctcagcctcctgagtagctgagactacaggcacatgccactatgctctgctaagtttttaaaattttttgtagagatgaagtcctgctatattgcccaggctgggtttcgaactcctgggcccaagcaatcctcccacctcagcctccccaagtgctgggattacaggtgtgagccagcgtgcccagccaataaagacctgttgaagaaaagtctccacctgtgaaagttttcttgctattggagtagggcgggggcgggggaacaataggagtgtcctggaagggctttaggagcattctgtaaatggccacgcatgttagtgattctattacagtgttaggtcataaaatgtcaaagctaagcgggacctttgacatcacctagttcagctccttggggaaattaaggcccagggaagcgatgtgccttccctgctgttcctccactggttggaggcagtgcagagagcacagcccaggcctgctgactcccagccagagcttgtctctctcatagcacgcagatcgttcttgaagtgccccagacctgatcatctgaaggctgggcctcattcagtacctgcatactatgtgcccaagatgtatgagatgtagcctcggccgggcgcggtggctcacgcctgtattcccggcactttgggaggccaaggcaggcagatcaactgaagtcaggagttcgagaccagcctggccaacatggcgaaacgcctgtctctactaaaaacagaaaaaattaaccaggcgtggtggtgggcacctgtaatcacagctaccctggaggctgagacaggagaatcgcttgaacctgggaggcagaggtttcagtgagccgagattgtgccactgcactccagcctgggcaacagagtgagactctgcctcagaaaaaaaaaaaaaaaaaagatgtagcctccaccctcctcagtgaccccacctcagtgcaggtgaccagtcagttgcagagtgtgagaagtcccacttgggacttcaaggaataggtgtgctgaggggaaggaagtgggagaaggcaaagaagtccccttcaaagaggtgacattcgagctgggccttgaagttgagctcagcttggccagcttttcctcctggagcttggccatctgtttctttgcctcccactccactaagtggaattctaattcaaatttttcctaagccatgtttgcatctttagttcattttaaccttgtaacatttctccccttcctgacccctccaaaccctaagtcagtctcccattttacagattgggaaatgagaaccttacagagttaggctgccgttctgagcagccaagtctgctggttcccacaccaggactttgctgggtccccacattgctatacccttcaagccagttctggtaaaagacaagacatagcctgcccagccctcttgttcgcttctgactccagacttctattcatccctcaaggtcccatgtttaaatccccttttaatgtctccaattcaaattgttccctctggccatttccccagctcttatacatccgtcacaggtaaccttcaatgcactcaagtgaattgtccaccgactccattgatggtgagttttttgagaggagggattctttcactcgtttccatgtagaatctagcacctgcttcagcaggtgcagtggccctgcgaggacctccctgcgaggacctccctgcctcctttccctgccctcagcagccccactgagtgcccagtcctttccttcgtctctcccagatcccacaggctgtctccacggcgagctgagggcaggtgatggccatggccctgctggctctctgggccttttaacacagctgctagctccacagtttgggagtcctttgtttgaatcttagaagcagcccagtggggaacacacaaagctgtgctgcttggctgggagctcactcttagagcagctccccagggctcctcagagagccaccagcctggtgtgtgtctttattcaataaacattcacgctgggccaggccttatgctggacgccgggagcacagtgcgtggggcactcctggtcttgcaaggactcttacctgaacctggagctgccctgaggaagcccattctcctctttatgggggcccagaggccaccctccctgcctcacacctgatagcactggccaccagggctggcacctacctggactgtcccatccactctcttattctatgctcttcagaaaaccaaggacagtccctgaccagctggctactggggtcagggatgcaggctatacactacggcagatcacttggggtggttttgaaaaatacagacacccaggctccaacaccagcgtggcaggatcagagcctctggggaggagtccaggaaactggatcattaaaagcctccaccagaagtgtgacagtagaatggtatgagatgatgcagcaggaaggccccaaccttccctatgatgttctttggccaaagacgtttaatctgatctaaccaagctttgagaggtaacctctcagggaacacaagggacagaggaacaaaccaaatgacaccatggggaagcaactggacaaattcagagcagggtttgaacccagggccttgccagctggagtactaaaccatggctgggcactttgaggccacagtgcactggacactgcccagggctccagcttggacctccagctgggcctggccctggccctaaagccagcagtggcagatgcgcacgcaggaggcagctgcaggttgggaggcctcacgggggatgctgcgaccacacccaggtgctcagggcaacgattccactctctacctttcaaggtgggtatttccaccacattcccaggagggcttctttgcgcctcatccccccacggcgctgaggatgggcaggtgaagacagccctgcccagcacctggacttcccccactctatttagggaggccccacccaagttcaaagcgctggctgcccctcccttgcagccccattctccatccccaggcgaggcagtccagagcgagcctcaacattttcctctgcacctccttcccccaacttcatcagtccctgccacccattcctccgcaggctccttgctttagctctgtcctctccttgcaacaggcgcctgggtttgcaaacatgcactcagcacctgttaggagccgaatctgggttcattacagacccacgcaggacttcattacacattccagcactcagcagggtgggccattggttctcatccctggctgcatagtaagtggccctgctgagcttagaaacaaggctgcctgggccccctgcagagaaagggatttaagtggtctaggtgctccctcccctctgtggtatcctccctccctccctcaaggttgagaagcactgccctaggtcacagacagggctggggacctgcccacagccccaccctgggtccacagctggggctcctgggtcctctgccctccccctgggccccacctcctattcccagtaccagtccctccaagttgttaggatcaacccgtcccctgttttccaacctctggtcttgtccacttcctctcccgaagtagccctcccccatcatctctctccttggcctctcagcaaatctccatgttcacggccacagaagcaaaacttccctgatccagcagccatgaagaagaagcatttgggcacgcccctccgtttccgtccaccttggcagaaatcagaggccggctactgcgctcgcgttttatgtgcgttccaaaacacacgctcacgtacatcggaaaaggacaggataaaagatgtgtttcaaaagaaaccttttcctcctgcagcctcatgcgtcatctggaaccccctgcccaggcctgactcctcgtttcctctggggttttcctcttttcttttcccttcttcctggtttccccttagctttcttagctgtgcagtggggtgtatctgtttgtgagtaggtggaagttctgtctgcaaaggtacaggatgctcacactctttggcttcaaggcagcaagccttttccctactgggttgggggctccacaccttccttggttcttgcctgcagctacatttccccccaacccaggacttcgctttccttactcttttttttttttctgagacagagtctcgccctgtcacccaggctgtagtgcagtggcgtgatctcagctcactgcaacctccgtcttccaggttcaagcgattctcctcctgagtaactgggattacagacgaggaccaccatacctggctaaatttttttgtatttttagtagagacggggtttcaacatgttggccaggctggtctcaaactcctgacctcaagtgatccgcccgcctcagcctcccaaagtgctgggattacagacgtgagccaccacgcccggcctcctcactgttttctgaccagaaatggtccactctgctctgcagagcctcacctcctctcccactcccttccttcccctcactgtgtacaacaccctgtcactccaccaggccaggcatgccctggtaagggtgctggggcacagggagtttctgtaatttctgtctgcattctacttacattcatcacagaagtaggaaggcatttcttctgggggaaacacacgttgtgtagaaaagataaaatctctctctctggcatggtggcgcatgcctataatcacagcacttcagaatttcgaggcagggggatcacctgaggccaggaatttgagatcagcctgggcaacacagcgagacgctgtctctacaaaacacagaaaaattagctgggtgtggtggtgcacacttgtagtcccagctactggggagactgaggcgggaggatcgcttgagcccaggagtttgaggctgtagtaagctgtgattgcaccactgcactccagcctgggcaacagagtgagatcctgtctcttaacaaaacaaaagaaaacaactctctcttacacatacatagaaatagcgaacatttaaagtcaaaaaattctaaatctctgcaaatgggatgtgtgttcgacacaaaaggcaaaatgtcagtgcacattagccccagttaaggttcccccaggaatcaccctggcctaagagaaggctcaaatcaccatgggtgggaggaggtgtcctccagaggggggatgacgtcatggagcacctttttggggacactcaggctgtgaatgaaataaagaacgcttttacaggtgattacccataatgaataagataaggtggggtacatttatttgggtagagagtggctaataaggtagtgaagaacttcaccaatttcctcaactctgctctaagtaaggtagtaaggagcctattcactgaggcactcagagtggccattttattatttttttgagacagagtcttgctctgtcacccaggctggagtgcaatggtgccgtgttggtttactgcaacctctgcctcccaggttcaagcgattctcctgcctcagcctcccgagtagctgggactataggtgcatgccaccacacctggctaatttttgtatttttagtagagacagagtttcactatgttgaccaggctagcctcgaactactgaccacgtgatctgcccacctctgcctcccaaagcgctgggactacaggtgtgagccatcacgcctggccagtggccattattaataataatagttaacatttattgaggcctgactatgtgccagttgccatgtaaagcactttacatagaatacatcctttaatttgccaaagaacccaatttaacggatgatgacatgggctcagagaggccaagtgactcgtctaaagtcacatagctaggaaatggtggcactgagatggcaaaaaaagcagtgagggctgagggaggtggctcacacctgtaaacccggcactttgaaaggccgaggcgggaggagcacttgagctcaggtgttcaagactagcctagccgagaaagcaagaccttgtttctactaaaattaaaaaaaaaaaaaaaattagctgggcatggtggtgaccacctgtagtcccagctacttgagaggctgagttgggaggattgcttgagcccaggaggtcaaggctgcagtgagccaagatcgagccattttactctagcctgggcaacagagtgagaccctgtctaaaaaaaaaaaaaaaaaaaaaaaaaaaaatgaggggagacatttaccaggacagggtttatagagagcatgttcatggaaggctaaggagaaagggaaggaagtgctcaggtcctgctctgctgctccggccgctgttggggttaacatccctgtaaattcaaatgctgggctcccgcctatcagtcttttttctttcgaatgttggtgcagatcttccgcactggaggtccatttctctgtgtctcagacaaggctggacccacgcccaaggcattgcaggaggagaggagacccccgacctgagggctggaggcatttgtgtgtgagacaggacaaagaatttcaggggaccagagaattcaaggtggcagagggttaacaagacctctcccaagacaacacacccagcagatgctgacaaatgtgggcaagagttcctgagagagaggccagggtagatgacacacgttcccagcaccttccaacctgcaaagcatttcctcacacagcttctccatgaatcctctcaacagccctgagagtagagatgccggctccagtttaccaatgacagattgccatcggccaggaagtggaggtggagttggaccccaaatcccatgctatcgctattttgccactctgtccagaccccaccctctggagataaccagtttatcccagcagagtgcatttattcggcacctgctatgtgttcttcactgaactaggcacgacggggacataaccaagacagtgtcacacggtgaaatctaacaggcatgttcatagggaacagcaggaggttagcaaggggacagccagcttataaactctctggtgggaggggcgtgggggagagcaagtgaaggaggacatagaacaggggtgggggtggataaaccacaagacctcaggggactgtgccctgagagaaaaggaagaggatgggcatttctgggacattgatgtcacataaaactccaaaacccaagggaccaagaagaaaggaggccagggcctgaggtcctgctgatgagcttcaatcttactagcggtgaagaggggtcaccatctatggggctgaaagaagcccaggccctatatgcaggctggatcccccgacaggacctgtcagagctagaaggagccttgggggtcatctggtccagtttgcatattgcacagggctcagagctaaggccatctcactgggctgaggagccaaagaacatagtcagctctgagaagggctcttcaaggctggctctcctttgtttgcagaacacactgtaccaccgtggagaggataaaaatctaaaattcagcaccttaacccattctcacaccagtcaaactttcgacagtcctattggtctatagatgcctgggaattccctcctttcccaggtcaggaagatctcgacctccttccaccagcttcccaggactttcttttctttctttctttctttttcttttttttttttttttttaacagattcttgctctgtcactcaggctggagtgcagaggtacgattccagctcactgcaacctgcacctcccaggttcaagtgattctcgtgcctcagccttccgagtagctggaattataggcacccaccaccatgcttggctaatttttgtatttttagtagagacggggtttcaccatgttggccaggctggtcttgaactcctgaccacaggtgatctgcccgcctcggcctcccaaaatactgggattacaggtgtgagccaccatgccaggcccttcccaggacatttctgagacacctggtgggaattcttacctgcttacctcacctgtgtccctctgagccaccattttggccctcatttcccaccctcgggtgctgagggaattgttccctaccaggaatgaatccccaggcttgtctgctcccccataaacaccctctggaatgtgcatccgaaacctcctaccccacaccagcgcattcagcccctctaccggcgccccatgtctcactcccctggtgtggccagaactggggatggtgcaagaataaagccctaggcagtgtggaaagcagacagctgaccctgtgacttctggggctcccctccgaggtggggaagaacagaggagctggcctctggggtctgagaagaccagccggcccgtgggcaaagggacgacagcaaattctcctccagtgaccctcagcccctgacgccctgtctaaccctctcagatccaaagctgcgagccctcaggaacatgtggctacctctaacccagctcacttgcctggttaaaagcaaccacaggtgtccagcctgcaaacatttcccggcacacagggccctgtgcaaggggcagtgggtgacgacaccaagcccagttccggagcaccctgctgttctgcggcactgctgactcacaaacgattctgccgctgtgcagtctcaaagccagccccacccggggatctctgtcttccttggtctgtcatgaaggtgctagtaacccccaggcttctcagataactccttctccttcacttgtgcactcttgctctctgtctctctctgtctctgtctctccctctctctctcacacacacacacatgcatgcacgcacacacacgtgtgcacacatgttaaattctaacccttgcagtaccatggatttccattttgttgagatgaatagaggattaaaaaaaaaagaactgatcaggttgtcggcagggtaattatcagtaaaaagaaacagaggagctgtcccatccgcaggtggtaggtggcaccctccacgcctgcaggccagggctttgtgatctggctgaccccaatcctgatcttattgctaccacccattaccacgtttccttgggaggactcaacttcctaatgagaaaaacatcccccacttcaaagaggctgcggggaggaagaattgaaatgatgtagataaagcttttgtcacagtccctggcacatagtaggtgcacaataaatgttggttgccattgtcatagtgctaataaagaccagtgacatcctctatgccaggcactgtttgtgtgcttgccgcatattaaccccataataattctgtaaggaaggtatgttatcatcacccctatctcagtggggaaactgaggcagagattggcccacattacccaggtaattagggacacatctggtctggctccagaggctgaagacttaaccacaatgttctcctgcccctctcagaaggagttggatgagagatcccatctgtatgtcccactcggggcacacagagaggcaagcgcaacttggttcctgccccgcaggggctcccagcctcattgggtgacagatcctaaaaatgcaactacaggggacctaagacgggagaatgattcaccagccagacagcccgggtgtcccctggtgcaagatgagcggtgcctgatcagtccctggttcctggctgctgcataggagagggggctcagctggatggctgactgattggctgactgcttcattcattaattcctgagtgcattcattcattccttccactcaagccctccagaaagggtggtctggactgaactagtttacacgggatgattacaacagaagtcagaggactctcagcttggttaccgaggaaaataagaccacaaaaccaaactgactgaaataggcaggagaatcttctcgatcccattttccaaatgggggaaaatgggaaaagggctccaaggttaaatatttttggaaaacaagttaaacaaataaaaacgggtcacactggcaggacctctcagtgctgcaactatgctaatgagctgctaatattcaaatgagaacaataaacaccaagaggctccaagttgcctgtggcgattcttaagtttatttgactccagaagcctttctcaacaggattatgtggggctgatgttataagaaacacactatgcgatgtcctactctggcccaagagctgtctggaaaagctgttccaaaaacctgggagagagtggaagtgaggctgagaggactcccaggaagacggcagctccaggctgggttttgaaaaatcctgggaagttcagggccaagtggaggagggaaaggaaagagttttccagtagggaatgggatcctgagagaaagacggtgaaggcccaaggcagtggagtcctcaggagtgggcttgcctcgggcgggaagaagggccttgggccatgggaaaaacaatctcaaagatgacagcacagatgggcacaacctctttggaaaacagtttggcatcatcttgtaaagctcaacattcacacatcctgcaacccaaagttccacgcctaggcaggtacctccatgaacacctttccctgctgtgcacagcgagatgcacatccatggccaggagacaaaatagataaactgtatattctaaagatggactattatgcaactgtgagcatgtgagaactacagcaagatccaggaacagtttgaaacttagaaacacaatgcagagagagaatagctcaacatagagggccacatgcagtataacaccatttttataatgctaaaaataggcaaaataaaacatttcatttaggcattattacctgggaaaaccagttttttgtttgttggttttttgtttttttgagacagggtctccaggctggagtgcagtggcgtgatcccggctctctgcaacgtctgcctcctggattcaagcgattctcctgcctcagcctcccgagtagctaggaccacaggcgtgtgctaacacacccagctaatttttgtatttttagtagagatggggcttcaccatgttggccaggctggtctcgaacccctgacctcaggtgatcctcccgcctcggcctcccgaagtgctgggatcacaggcatgagccactgtgcccagccaaaaaccagtatttttaagtaatggaataaataggtaaaattcaggatgtggtcacatctagagggagatggggaatgggctgaggaggacccacagatggacacgacggcctagtcacggtctggtccttcagggacatagtgaggctcaggttttcattctgtcatcatgtctaatatatatgattgttctcttgtatatgtcaagtattatgtaataaaaatatttttgatcagcttgcaggagaatagctggtatctgcttaggcttgtgccagccataccattggcacatcagctcttcttcaccctgaattccttctcagagtttagcagccctctctcgcctaaaggttggatgcacacagtgactgccagccctggatcagcctgcatcccacccaggcctcctgcacttccagccacactcactcactgtgcttagcaagggcttacacagccagtgcctcagccattaactagggtgatattaaatctacacagaccactccttggaacccccataaaaatccctgataggctgggcgcagtggctcacacctgtaatcccagcactttgggaggccaaggcgggtggatcacgaggtcaggagatcgagaccatcctggctaacatggggaaaccccatctctactaaaaatacaaaaattggccaggcatggtggtgcgtgcctgtagtcccagctacttaggaggctgaggcaggagaatcacttgagcctgtgaggcggaggttacagtgagccaagatcacaccactgtactccagcctggtgacagagcaagactccgtctcaaaaaaaaaaaaaaaaaaaaatccctgatagctaaccacatttaattcacccttcccttcctgagaactggaggcctttgtgagtactctggctgaacaggataccagaacgcaaggtcatgccagagtctgcattgccttttgtccaccaagtcacagacttctgccacatgcctccccacccgcttctttcttcagataggcttattggttgggacaaaccaacataaagtgtgtgggattccctgaagccagccttttctgttttggaaggaattcagatctttctgctctaaagaagcctggcctgggagagaatatttttataaccctgctacattagatgacctgtagaacatctttaatgattcaccttcaactcagtttctattatttctacttttttttttttttttttcgagatggagtctcactctgttgcccaggctggagtgcagtggtgtcatctcagctaactgcaacctccgcctcccaggttcaagcgattctcccatctcagcctcctgagtagctgggattacaggtgtgcgccaccatgcctggctactttttgtatttttagtagagacagagtttcaccatgttggccaggctggtctcgaactcctgacctcaaatgatctgtccgccttggcctcccaaaatgtagggattacaggcatgagccactgcgcctagccagtttctgtctgttatttcatttcaacctcacaactaccttgagatcatattttttattcccattatacagaggaagagactgagactcagatttttaagcaaccacccaaagcaaagttctagaagctatgaagtggacatctgggatttgcaccacaggtggttctgtcacagagcctaccctctttctggagtgctatgttgcctccccacaccaaggttagatgcccagagccggacttcctgggagatcacagagtgaggggagtgctgtcccagagagtggggaccagctgagcctgaactgcagcctgcttgggaaggagtctgattcctgggccaagtgctaacagaattcctatttatttatttatttattggagatggagtctcactgtgtcacccaggctggagtgcagtggcgcgatctcggctcactgcagcctccacctcccaggttcaagtgattctcctgccttagcctcccgagtagctggcattacagctgcccaccaccacacccagctaatttttgtatttttagtagagacggggtttcaccgtgttggtcaggctggtctagaactcctgacctcaggtgatccgcccacctcggcctcccaaagtgctgggattacagatgtgagccaccatgcctggcctgataacagaattcctaactgtgctcctgcaacactcaggatgatgtgtgaggctcgctagtgatgcagaggcctacagagcagaatccctgccctcaggggctgactcttacactgggaagacaagacagatgcacatgaagaggtatctgagaatacaggaaaatacacaacaagtaccagctggtcttcctggcagagcatcacagaggcaatgagaatccagctggagcagggagacaagagtctgggaccagcaggtgactctcaacagtgtcctttcatcccacaacctgtctttgaggatccactgtgtgccctgtgctatgtttggtggtatgggttgaaagatgatggagaactggtcctgcccacaggtgacttacagtctagtccatgaaatagatgtgctcagaagggcctttgctggggccgcggtgctgagggaaggctgcgcagaggaagtgatggctgaactatgatttcaagactgaacaggagtttgtagtcatcccaagagaaggcagggggtagcacagaggcacggagaagtgaggtgtgcacgagaacaacgcagactgtaacatgaaattaatgtcagcaaaatgtgtgtctaactcactgagtacacacctgaccctgtgctagtctcacatgcgttatatcctttcatcctcacaatagccctcgttatccccattttgcagagagaaaaccaaggcttggagaggtgaagtccacccagataaaaaggcagaaccatctagagtccaggactgctgtacccaggcccatgtgcttacccatgttggggttgggagaggagcgggtgcagggcggcaggggccaggctgaggagtatacaacaacacagtcatatctgctgctgctgcactcctaattagaccgtttaaaaatgaccaaagtggccgggcacggtggctcacgcctgtaatcccagcactttgggaggctgaggtgggcacatcacctgaggtcaggagctggagaccagcctggccaacatggtgaaaccccatctctactaaaaatagaaaaattagccgagcatggtggcaggcgcctgtaatcccagcaacttgggaggctggggcaggagaatagcttgaacctgggaggcggaggctgcagtgagctgtgattgcgccattacactccactctgggcaacagagcgagactctatcttgaaaaacaaattgaattgaattgaattaaattaaattaaattaaaataagactgactaaactgatcagaaaagaagatccgttgaggctgagaaaggctaaaacatggtccaagtttaacaaaaagggacttggaggtaagtgaccacagctgtgagggagggcagtgccactgtgggtctgccaagggagggatggagatgatgcagccacattagaggaggcaagccttcttcccgatgctgtgccagttcgaccctagtggaactgtttccccgccaagccctaaggcctggctgtagcattgagaccactcaacgaagcctcatctaccatgtgcccagtattgaaaagtttcatgccaggttcacaaactgttaaacataagatattctatccagctcattaagctgtacactgacaagttgtgtgctcgcctgtacgcatgtttgtgatattataaaatatatatttggtcttcgacctagtttcccagcgtacaactcctaaaatccttagaaactccaaagtgatgtctttttgtatgctaatgagctgacggaagagctggcagcccctaggcagcttcaagattgaggttggttaccccaaaagacccaggcaggattaaagggttggactttcttttcttttatttatttattttgacggagtttgactctgtctccctggctggagtgcagtgttgtgatctcagctcactgcaacctccgcctcctgggttcaagcgattctcctgcctcagcctccccagtaactgggattacaggcacctgccaccatgctcggctaatttttttgtatttttagtagagatggggtttcaccatgttggtcaggctggtctcgaactcctgacctcagatgatccacctgcctcggcctcccaaagtgctgggattacaggtgtgagccaccgtgcccggccaagattagagggttggactcccaaccctaaccccaaccccatcctttgggaaggggagagggggctgaagattaagttgatcactagtggccaatggtttaatcaatgatacctatggaatgaagcccccatacaagcccaaaaggacagggttcaagtgcttccggatagcggaacacgtggaggttcctggaaggtggtgtgcctgggaagggcgtggaagctcagtgcagcttctcccatacctcgccctatgcacctcttcatctgtatccttgtaatatcctttataataaaccagtaaacgtgtgttcctgtgttctgcgagccactctagcaaattaatggaacccaaggaggaagtcacaggaaccctgatttatagcaggtcagtcaggagcacatgtaaagcagcctggggcttgggattgctactggaagtgggaggctgtcctgggaactaagacctcaacctatgggatcagatgctatgtccaggtggagatcatcagaattgaattggattagaggacgctggctgatgtctgccgcagaattgacagcttgcttggtgtatgcacgcatttggtcgcagaagtcttctgtaccaattattgcagggtgaaagcagaggaaagacagtttacgtcttttcctgtactttcattaaaaagttaatcacttggccaggcgtagcggctcacacctgtaatcccagcactttcggaggcccagacaggcagatcacctgagctcaggagtttgagaccagccttgccaacatggcaaaaccttgtctctactaaaaatacaaaacttagccaggtgtggcggtgcacacctatgatcccagctactcgcaaggctcagggaggagaatcgcttgaacctgggaggcagaggttatagtgagatcgtgtcactgcaatccaacctgggcaacagtgcaagactatgtctcaagaaagaaaaaaaaaagttaaacaatcattctatcctcctatcttggcaaaaaccttacttgccacctagagggctaggttacctgataaagttcacgctagacaatggtgacatgggagatctagccccaggcctgcagcctgcccatcccttctgcatcccatgctggaggccccagccacaccctcaagctccagccacagcccttgcaaatgaatttcccttgaccagcccttggccacaggcagtgtggcctgccctggcagaatgggccccaggcagaggcctgcagagcccggaagcaggctcacggctgtctgggccagatactccaggagcctaaattctcatggcgcagctgaagagggtgggcacaggctgtaggcgggcatttctccctgaggacccagcatgccttctcctttcaggtaaagcgtgttttcccttatgtcctggctgtgaggaaactcagggcaagctccatccttgcacctgcattgaccttgacttgcatatttgtcttctccttgaccttgatcctgctcttctgtttttgttatttatttttattttttgagacagagtctcactctgttgcccaggctggagtgcagtggtgtgatcttggctcactgcaaccaccacctcctgggttcaagcgattctcctgcctcagcctccccagcagctgggactacaggtgcgtgccaccacacccggctaatttttgtatttttagtagagacggggtttcagcatgttggccaggctggttcgaactcctgacctcaagtgatctgcctgcctcggcctcccaaagtgctgggactacaggcgcaagccaccacaactagcctgtttttattttgttatttaatctgatgtgttttccgtcataagcctcttgagggcaggcatgctggattccagactccctgccctatggggaagggaagtgctgtaagacaccagacggaagcctctaaatcagagagctgatggcaggccccctctttccctgatttaaaggcaattctgtggctataggacttgcaggaagttgtagaaaagctggtaagagatcagaagaggaagaacaagtagttaaaggtgagtagaggatgggtcacctgggaggaattgttctagagaaggaatgagagatgaggccagccggacttcctgggtcaactggggacttggagaacttttctgtcttacaagaggtttgtaaaatgcaccaatcagtgctctgtaagaatgcaccaatcagtgctctgtagctagctagaggtttgtaaaatggaccaatcagcactctgtaaaatggaccaatcagcaggacatgggctgggacaaatgagggaataaaagctgcctccccgcccaccccccccacccccaagccagcagcaccaacccccttgggtcgccttccatgctgtggaaactttgttcttttgctcttcaggataactcttgctgttgctcactcttggggtccttaagacctgtaacactcaccgcaaaggtacgtggcttcattcttgaagtcagtgagaccacgaacccactggaaggaaccaactccagacacaggaagattcagggatgagacgaaccctggtcctcaagtgcaaactggaaccctacccctggaatcccagcactttgagaggctgaggcaggaggattgtttgagtccagttcaagcaagagtaatgtagggagatgctatctctacaaaaaaaaagaaaaaaggctgggcacagtggctcacgcctgtaatcccagcattttgggaggttgaggtgggcgggtcacctgaggtcaggagtttgagaccagcctggccaacatggtgaaatcccatctctactaaaaatacaaaaattagccaggtgtggtggcgggcgcctataatcccagctacgtgagaggctgaggcaggagaatcgcttgaaccggggaggtggaggttgcagtgagccaagatcttgcaattgcactgcagcctgggtgacaagagtgaaaactctgtctcaaaaataaataaaaataaaaattaaaaaaattagccacatatggtgcttgcctgtagtcttagtgatttggcaatctaaggcaggaggatagcttcaccccaggagattgaggctacagtgggctgtgattgtaccactgcactccagcctgggcaacagagcaagatcctgtctcaaaccaaaccaaactgaaacttgacagtgatattcacatccccaggaagaaaacctgggcctggattaaggaaagactgaagtcagatctaaggaggaacttcctggctgtggtgtggtgtggtgtcactgaagggcctggcttcaggcagtttgtctcttgtttagagctctggggtttaccaaccatggagccttcggcaatggaatggtgcctcagggcctcagtttctcatctgtagaatggggataacaagagtctctgcctcctggggttgtcgggaggatgagctaatgtgtgtgctttgtttcctcaatgtatgtgatacccgggacatcataagcgaggaattactagctgccactggagccgcccacttgcttccgagctccttacagctcctggttgggtcctgtgatcctcggttttctttttttcttttttctttttcttttcctttttttttttttttttttttgagacagagtttcgcttttattgcccaggctggagtgcaatggccaggtctcagctcaccgcaacttcagccctcggttgaagcgattctcctttctcagcctccccagtagctgggattacaggcacgtgccaccacgcccggctaattttgtatttttagtagagttggggtttatccatgttggtcaggctggcctcaaactcccaacctcaggtgatctgcctgcctttgtcccccaaagtgccggggttacaggcgtgagccaccgcgcccagctgagcctcagttttctcacaggtaacatggggatgaagaggctgctttctcgaggctgctttagcttccaggacagtgcagaggtcacagactccatccttactggtagcagagaaaggctccagaatcccctatggaagcttcagttaagatggagaaccacccagcctgaggctagacattctctcctccgaagtcagggactgggtggggtgacctgcacatgtgttgcccaagggcagaagcggaggggaggggagagccggttagagttgtgaggacaccttgctgggtgaatggggagatccctggccgccgctcccctctgctcctccttggggctccatctgcagagtggggcttggccctcacgatggctgctggggacgggagcagctctgttggagagagggtgggtgctacctgggcactccgtcacctgtggaatggtggcaatagcaccgtcggcttccaaggcaagggagggtgggaggaaccagttgtgaagggagccaggggtaggggtggacatagtcattggccaggaacgagagacagtccctagaggaagattaggaaccaacctcagctttagagtggagaagatcatggaggaaaaaaaagaggcgacttctctgaagacaagacctttgtagacttggggaaaagctgacagtaaagaaacagaaagaaggccgggcctggtggcttacgcctgtcatctcagcactttgggaggccgaggcaggtggatcacttgatgtcaggagtttgataccagcctgaccaacatggtgaaatcctatctctactgaaaatacaaaattagctgggtgtggtggcgcatgcctataatcccaggtacttgggaggctgaggcaggagaattgcttgaacccgggaggcggaggttgcagtgagccgagatcatgctactgcactccagcctgggcaacaagagcaaaactccatctctaagtaaataaataaacagaaaaaaaagaaacagaagcagactggaattctcataactcaaaactatccagtcaggaccaactccctcccagagcaatgtttattttgctttttaattcgcatgtgccttgcttctttccagaaaggatttgaagaggttgacagcaaatgtgtatcccaaagacaagtctttattgaggatccattatgcccaggccaggtacaaagactccaacatgtctgccctcaagaggctgatgacggaaaacacatcagattcaataacaaaataaaaacggaagagcaggatcagggaaggtccacacgggtgcaaggatgtggcttcaggtggacctctgagttttctcatagccaggacataaagggaagcatgctttatcagaaaggagaaagcatgctggctcctcggggagaaataaagctgaaggtcgaattgtaaaagtgaaatgaacaattggctgtttcagagataccaacacaagaattggactagggcaagaaagaagattctgcccagctgctttctagcacgtatatgatggagaccagatgcaaagcagcaaaaaggactaagtagaaggaaagagcttagtgctggaaggaatctgagaggtcatttacgctaccctttctgtttcacagatgaggaaactgaggcccgggaggcagtgatttgatcaaggtcgccccttacccatcccaggggcaacaaaatcctcacatggccactgctgtcagcaactgtgcaatcccagcttgaggacagcctgatggcttgtggaaaggtggccagtgaagaggacacatccccaaataagagacttcccagacgttcacaaatagtatctataagcccaaagcatcagcctttgagtggaaggtcaagtgtaaacttgtctcaaaaccatcctttggggaacaaagtagaatatgaacaagcaaatttttaccccaataacaagtccacaactgagcctgaatggtggtagaaggaaaaaggctttaggtccaacagggtgtgggctcagggcttcccatgccatgcccaggctgcactgtgggactccctatctataaactggcaagaattagattcagataaatcatgatgtctgcatggggatcagcacatagcacatggtcaacaaacgtattaacctgttcctagatagagaaacaacttctgccaattgcaatcttaaaattaatgacttagacacttaagcatcgtgtgaactggtgaacatggagggggaaatagtacacaaataggaaacgtttacaagtggaactgggattaaaaaaaaagaaaaagaaacccaggggaattgacactgtggagaaaaggctcatctccactcctgggacagcagcctgctcaggtcgaggggcccatccaccttgagagaccctctaaggaccctccatagttcagggctgttagctacatgacctgagccaagtggggtccgagctgagcagcgcagagcagactgaccccaggtcaacaggccccaggttgggctgccttttaaagtcagagagaggaggtggaagtatttcaatgaacaagcaaagaggtgagtattccagttgaagtgggttattggggggatcgagggggtttgtgaaagttacaactgcgcaggtggacagaagtgaaatcatagggagcctcagtaccagataggaagaggggagccatgggaggtgtcagagcaggggagtggcaccctcagcaatccaccttgtgaagatgattggtgggagctggagaggaggcgggatcctgctcactcacagcacaagccctatttgcattcctaatgggccctgcgagattggttttccttgccggcccagctggctctggcagataagtgggactctgtgcccaggggcaggtttcccagaaaggtcttccagacagacctgggtgcttggtcctgttgctcccatccccctccccaacacacacgtacacacactcagtcctcgcagtttttccagccgagctggagggaatggcttgtgcctgtctcctagtttgctaggccttacccaggccattaggattccctgatgactacaggcctcagcagagccccttccagctggcagccctttgccctcgcccccctcacctccacctacatcttcccatgtgtccctggttggaaatctcactctgggtctggccagtggtttttgcattaggccaggaggataaccaagccccatgccctgagctgtgaacctgggtatgccccgtgaccagttggcttcagacctgaggcctctgtgccctctcccaggggctctccagtgagcatcaggacccctacaggaaggagctgaggactcccctgtccagccccacttcttcctctgctggaaatatcaactcctcaagctcagaggctcaggggggctcttaggtccattcttagcactgtctgagcagggactagctcttattcctctcctcttttctttctttctttttttttttttttttttgagacagagtgttggtcttgttgcccaggctggaaggcagtggtgcaatctcggctcactgcaacctccgcctcccaggttcaagcgattctcctgcctcagccttccgagtagctgggattacaggctcccaccaccacgcccagctaattttttgtatttttagtagagacagggtttcaccatgttggccaagcaggcctcaaactcctgacctcaggtgatccacccgcctcggcctcccaaagtgctgggattacaggcgtaagccccatgcccagccttcttattcctcttttctaggactcacagtgatagttaacttctctggaaagaacctgacacttcccaagtgtcctcaggaaggagtcctcagctccttcctgtaggggtcctgatgctcaatggagagcccctggcagagggcacagaggcctcaggtctgaggccaactggtcacggggcatgcccacaaagattattccacctgaagctcttcacggccctgcaagcaggcagggcaggtggtcgtgttattatcatcatccaatttgcagatgagaaaactgagggagggaggagactcatccactgtctcacagctctttgtgtgtagagtttagagctctgcaccccccacccttccctgagaccagctttcagtgaccaccccctccaccaggcacagatggtccaaatagctgggtgacctgaacgcggaatacagcctccatgactgcaatctcggagctggaagtctttggccagcagcttatccaactctcctagttactgagactcagaacagttcaggaagttgcctaatatcaagatggtggcagagccaggtctcaggtgccctaactccctgcccggaagccgcccacctcctcacactggcccctctcgccccagagcccgctctggcatctccttcattccctagatgtatgggtgtgcctgacatttctggaattcactccacacacataatgaggccattttgagaaggcccgcctcagggggaaccagagagctgtctagtgtccccatcctgacccctgccaactcctcccggctgtacaggccaggctgcaaacagataaatcgacactactggcttcagcaactctacccctgcccgccctacacctttccagccttaagaactagcagtgagggatttgggattcacggctgcgatgcagggaactaagcggccttaggtgtcatcgggcgggttgttgcatgggtcagtgttaatatgggaaatgctgatgtcaactcagcaggtatggaaacagaatgggggctcctgtcaatggcgcggaagtgattgtagctgcacccagcggcattggggtgactctctgagatattagtttgacatgagggtatggggccgtgcctgctggcagaaccgttgtgcacctggggtagccactgtgctcacgagggacaggctgcctaacgctgaagaaccgggtttcagcctctgagcgcaggaccttctctccagcccccatggcccactgagacctgagcaacagaaaaggagcaaacctgcaggcaggccctcccaggcagcagcaggacagggtgcccgaaggagagcgtggagttgcctctcagaagattctagaaactctggctgggtgcggtggctcacgcctataatcccagcactttgggaggccgaggcgggtggattacctgaggtcgggagttcgagaccagcctggccaacatggtgaaacccccatctctactaaaaaattcaaatattagccaggcatcctggtgcgcacctgtaatcccagctactcgggaggctgaggcaggagaattgcttgaactcgggaggcagaagttgcagtgagccaagattgtgccactgcactccagcctgggcgacagagcaaggctctgtttcaagaaaaaaagaaagaaagaaagaaactcaactctgcccaggtgccttagctattccgctgcccagaagcagggaggagacccagtgctccttcccagaaggcccgttttccagcccgtcgccatccagtctcccttggagaagtcccgggagatgggatccagcttccttcctcttttcccaccttctccactcccagaagctattcctgcaatcctggcctagcctctcactgagagcagggaattccctctctggcagcgggataaagaaggaccctgcttagagccgggacagccaaagggacagggagggcctggatggggaggaggcagaagtctggcccctgctgcctccccacacatacctccacccccctacccccgccccaagaatgtaattaagcagcagcttctgccaggagccaagctttctgccttccgactataaatcaccttctgaatcatctctcagctcctagagaagcaacttctgctcaggctgctctgggcggccctggtgccactccccctgggaagcctgcctcccccaccccttctgtgcccagccccctggctctaggtcccagcaagagtctggcagactctgggggtcggggaatgattaggggacactccagcaaccttctctaccctgccctccccttcctgagcaggtaaagagctgaagtgagattagcctggcccagcaccctcaacttaagaataaagctaaagcactgtggggcaaacaggcaaaaagaagaaaaggggaaaacagagccaggtggggcaaatctgggagggcttcttggaagaggcaagtttggctccagggcttcagtgagccaatagcttgcagataggaggtgaaaatagctaacatcgatatgcttcctgtatgcaaggtatcattctaagaagtattcactcaatcattttcaaaaccctatgaaatagaggcaatcattacactcattttacagatgaggaaactgaggcttgcagaggttaacttgccctagttacccaggtagtacatgaaaaagccagatgtgaatgcagatggcctggctccagaagagtgggagtgtttggggcgaggtttggaagtgcaagcaggttggcttggcaggagtggggcagccagctctttgcgatttaggtcagatggagccacagaaagaaacgggtggactgtctaatacaggcccggaatgtgtgcagtagagtgtcatgcttcacagcaacgagcccagaacctgtcatagccctgggactctgagaggcaaaagggacccctccatgtggttaaggaaaatgaagcccagaaggaggcagggacttgaatgaagcccagagaagggaagggactcatcctaggtcacagggtccattggtattaaacttggaattcagacataggtctctccatctccccactctcaccattttccagcatacaagataacatggatgtacagatgtaatatcaggatggctctaacctttggcggggggtgggggtggggctaggcatacctcctccctgagttaggaatgaggggtggaggatgtcttgccctccttggcagctggagaaggtttctgtggctcacatcagggtaggtggaaaaggttctgctcaactcctggctcatcacattctgagaccagaaaaatcttcctttttcccacttccttttccctggaagggtttgttagctgcatcctcctctgtgataagtcacctttcctgtgccatcccctggctccttatcccctggctccttgtctcctgcccagaccaaggagagacttcttccaattctacatctgcccaagtaccattaatgtttattagcattaagttctgtagtgaggaggatgagagatgcttgctaggctgagtgcattctttggagatttccacccagagccctcgctgtctgcctcagtttctccacctttgtcagtgactgagcatgtatccagatgccagagtgtgggccctggtagggcctggctgggtttgccactggtgaagctgcagcaagcacctcctaaaggacttggcaccaaagtccagctcctgcctcttttgacctcatcgccaaaggtcttcccaccaggccaggattaattgcagggcagacatcacagacccaagccctcaggatccctggggtggaggtgggggtgatactcagactccacccatctctcacctcttggccccggagctgttgacaaaatgctctgagagtctagaactttccctgagagcgtccccttcccccatgccatccacatacatattacagcaggttcttctaaggacataactcagctcaggctcttggtattattataacgtttgacctgttttcttctttttaagcaaaatgtgatcctatcggaagaataccaacagatcggccaccaattttgctccctctggactccgaagccccacccataatgggggcggggtgagcgggagggctgttaacttccaagagacctggactaatttccccgccatatcccccccagggaaaggtctgccctggaagggagaccacccggttaaagcctggccatccgatctggtatctgcccatctgtctgtctgtctgtctgtctgtgggatcaacagcctccagctagctcagctcctcaccagccccagccagcccagccccagcgagctgtaattcctgcctgttacaagtgttaacacctggcctggggccttcctcccccgcagtctccaggtgcctccctgggcccagcccactgacccccacggggtttgactgaacatgttcacaagcctctgaaaggtgggtggaggtgggagtgggtgggagaggcagcaggacatctgacagatggggaaactgaggtaggtcttaggcaggtgctcgagtgggaggatgggtcctgggatggcgagaactcaggtgtgctatttcccagctcactgcccttgtcctctgcaaaacattttcacccaagctgtgaggcagggcaggctggggactcctgggtgaagtgtaaggaagcagacccagatgggtggccactggtcctcagtcacacagcggcagggtgagctcctgatctccagcaggccccctccatctgcacgtccatcgctggaatgtagcaggtgctgggctaggccctaataacataggttcatccccccaccccagcgcccccaagaagaagaagaaagacaagtttctccaccaggagctaactgggactgacaaggggaattcgagaaatcagtgctgttgtttcctgtcccggctctgtcactacctggagaacatctcttccttccaggggtgtcagtctgaggccccttagagctgtcccttctggtcaaccttctgtcaggactggggtctgagcagtgtggactcagggtgtcatgcttgagggtccgcgtggacagaaatcccagctacatgacttcccctgtaaatccttcctggggaatgcatgagctgggtgggccaaagagggcaggccaagatgggcttagatgctcaaagtactggaatctgactgccaggcggggggctgggttggggagtgggggcagaaatgggatcaggaatcagaggcccatctaccctacagccccagccctaaccctgagaaggtgactcaccctccaccccagctccaagaccaaagaaaaacaacctcagagagaagggccagtgactctagtgcctggacagacaggacaagctggtgtcaaggaagcctgtgcccctgcctctctagcttgccatccctggccagctgtgccccctgcagccaccttgtgagacttttgcttcctgttggaccttccctccaggcccatggctgcccaccaaacacccaagctcaggtgtcattcatacccacaggtagatgtctgcaaagatattcacagccacacagccctgggcccagcacctggggacaggatcacaggcggactcagacacagccctcacacagctatggacttgaggctcactctcctccttacaagcacaatcaggtcatggccatgagcactgatattcatgcacaaagacatctgtggggctttccccacactgtcatgaaggcatgcgcgcgcacgtacacacacacacacacactcacacacacgcacgcacgcacacacacactcacatgcccagtcatgaacacagtcaagcccagcgtcacaggcagacacaggctctgacctttacatgggcaaagatacttctagacttctctctgtctcttacacatgtacatacacacatcacagcaccagccacttgctcacactcgtgtgcagacacacacagcacaacctgtcgtgggcatggatcccccaacacgcccacacgatttcacatccatagtagcccagttgcaggcacaaacacttttgcacacagagacacactggtgtatagaaaacacctcttagggtcatagacccagaacacacgcacacacacacacacacacacacacacacacacacacacacctctctccttggcttagacaaagcagcattcctgtcccccaccaaattcccaaacaagccatgtgtctagcattatgttagggccaatgtcttgaccttccaggtttccccagcgtttcttcctattgggcaatccctatctagatggtccccaagataccatttcacaccagaatctacaccaactggaagagtgccctcttctagttcatagggccggagagactggtctctcttcctcagtccctgccacctatgggccgccaaacctttccttcctaccctcccccaacccaccagagtctctgcgaaagcaaggcgaaaaacggcatggccttggcccgggaatgggaagagggtcaggaatggccgggtgaggctggactggtgttggcagcagcctttccccagactggccgaacctccttcctgaagtccctggctgccctggccaccccatggacttctttatgtgctggaagcctcaggttagcccagccccccggaaaagtgtgggttgggcagaagaaagacttccccttggctggctgtcctgggagcaactcctagcaccctctaaacagagacccttggccatgtccccaccctctctcccaggagccccaaacacccagacacaaatgctgccatccccaaacaactggaagactcggggtgtggcccccaagtctcgctgtctctgctcctcctaccctggactctgggttggcgaaaggcagggagtctggggacctgcaggcggtaccgcaccgtggtggcacttctttctgactttcaccccgggggccacagcccacttctcactcacagatcccaaattcttcctcctcacctccccccgcccaggccaaggctctcctatgtccaggaggggaagattctttaattaaagttttccggaatgtagggggctggagactggggagaggcggagtgtaatttagagaactggtttcagtgtcttcccctctggcccctgggacctgcggagggtgggagagcggcgatggggccgctcggaaaacaaggggactcctggagctggggctcccaaagcgatgtttattcctcacccaggccccccagacacgcacagccccccccaagcactgctcccggcttcccagtcttatttactaaaatgtcttttgtatccacatttctcagggacggaattctcccttccctctccctttctcctcggtcctcggttttccaaaaggaagaaatgtgacatggagaattggatttttggtcaaagaacaacaagcctacccctcccagacaacacattttcaaggaaccccccttttgccagggtggacaagcaagaaatgaataaaatccgaattcaatggcatcccggatcagcaaataccatattcacttcagaggctcaagatgaatctagagcggtggggagaatctgatgaaatccccccacccactcccctgccccgggaggagccctgaagcctttggggtctgaaataggaaggcaaaggggggttattatggggaatctcttgatggaggcgccggcagaggtggggtggcagtgaaggaacaggatggttttgcccatgaagaccccaaaatggagaagaggagtggctgggccccagggacagtgctggatttccagaaacccaactgcaagcaaatggggggtcttcgggggcctctagattgggacgggcagagggttaggatctaagaataagaaaccttctgagatgggaaaagtcctccagcccctgcagcggggagcagggaaaatggtgattatcagaggagccaggagttggattctgaaggcgacaccagcagaaaatccaggaggggtgggcgggtggggggctggagggaggcgaggagaggagccccagccctgcagcggcccacccccagccggcgcccccaccttccccggacgcggcggagaaaccgggccgcgggcagacaagaggcgagtcttaccaccaaattgggtagccagcgaggaccctggtgccaccgagcaggaggccgaggagcagcccgagcaggtggggctccattagaagaggcgccgaggaggaagtttgcccgcgaccatgaagagggggagcgacgcccccaatagttggaacaaagtccacttgagattggaaatgactttcgggcttgtcagaagcgcacctccacccgcagccgcccccctcccgagcccagcgcggagcagccgggtttgaggatgtcagcgagcagccaatcagcgcccgcggcctaaggtaagagatgagtctgtagttcagcctgtcaatcacgcgcccctcccgcccggcccacaactcgggctccgggaagggcatcgcccagcaaacttgggcaaagcccgcgccccggacgccgcggggcttcggggggacgcggtgggccggaccctctgctaccgccgcggtcccccgctggccagggttagggcgcgggggctttgacccgggcgttcacatggcgagggcttggcgtgggcatgaacgggtggctcctttgctggcggggaccgtgacccgttgggacgtgggcccgcgaggaatcgagggtagaaagcacagggatgtttccagaagccccgctcgggcaggtcaggatcagagggtgggggaacgcaccccctcccagcttccagcctcccgagtccgcccgctctctggcctctcgtcctggccgcgggaggtcacttcccgggtgtccgaggaacgtgcggaaaagtccgcggaggctcgaaggtctggctgcgggcggcgccgggggacggagccgagtgtcatttgagtcttttgtcagggatcagatcggtatcgggacctcctgctgcctttgcatttcctgcaactgacaccagcggccagtcgcatttcctgctctcggagtcgggtcactttctcctccttgaggggttcaggcccgacctctggcccgggtcggaggcgtgacccacagcctcagtgggattctcggttggaccatcagggaccggtgaaacgcgcagctctggccgagggcggcccaggtccttggaagaccttgctgccctccggagcgcccctcactgcccgaccgtcccgcctgaggccccggttctactgatagggagctccagcctggggtttggcgataaaggcccttgccctgtgcggacaccaaatgcctccagttacccacccctccccacaggaaaggagtccttccaggcccccttcgggcttgcttcctctcctctccctctccagagcgaggaattaggtctcagccctgggtggtattgacatcatggtcaggttttggggactcacgcccggtcacctgggtgcctttccctaggccccctcccaggccacctgaggcaccaggactctgcgcagccccggtctggggtgaaggaagcactgccggtggggagcagggaccgctgtgtagggaactgtggcagaaagggcagagaatgagccgacccgagtcccacagaggcctggaacggcgggcgttccacgaggtgagggccatggctgaaggaagtcttacgccagggggccagacattcctggcctttgatctgagccccccgtacccacagctccaacctgctgccccttctggtcggcgagccctctccgcacgcggctgctgccggcacagggagcgcggggaaatggcctcgggggcaccaagggtcgggagagccgcctgggcttgtcatggctcctgctgcgttcccagcccattgctggactggagggggtgggaggggaggttgaaagagaggaaggaaggggaggaaaaggagaatccgagaggaggagagagagagaggggctcagagatgagagagacgctgagacagaaaccaagaaaactgtcggggggaggctgagccaccggtgtgaggaagaaaggggcaggggggaggcggagagcaccaaggagctgcaaggcgaagaaaaatcgtgaacctgaccaggagtggtgaacctggtgggggctgcagagatggggatccctagagatgctcctcatggctgggctgattctggggtgccctgtttctgattcacctggaaagagggttaccattgccatgaatgcagagcctcaggaccaaggctctggcagtggagagctttccacatacctccctcttggatggaggcctgctaggtcctacctggagtcctgtcccacccacagggctcccaggtggctttctgatcagagctgcctgctggagtcctgcccaagggctcgggagttccagagccccatgacagtggtgctgagagctggggagggctaccttccctggccactcagacaccactgtggatgcagtatggtggggcgacagggcctggacttgatggcttcttggggtcattactgggcctcaagactccacaggtgccaaccctgtgaggtgggagcaaaagatccgaggctgtcggtgggagtgtgtgttggctgagatatgcccagccagcatcctgggtgctgtgggcaagaacatcattccctgaggggtcatgtgtacctgaatgcctcctccaggcagcctggagaactcagacgcaggtcatgtgcatcaggcaggaaacaagtgggttgaagggtggaatctaggagctggccatgtgcgcctgggaagtgacagaggagaggactggaacctaccagcggccctgccaggcccctagtgaatggaggtgtgtgtggggatttccgccacttgaaagctcctcagacaaggggagcctgagtcccttcctttcccccaggtgtccttccttcaacacaggtttaatttccttcctcctgcaccccttgcgctgccgcgggtggaaacgcaggaatggtttctctcaggggagggcgggcgcccctgaccacacatcacagatagaaacaccctctctctaacaggtaccccaagccccagggtggtttcacttggtggagaaagggttaaattcactccaagaccaggaagggagggcggggtggaggcatcagccggtggaccaggaggccatcgccctgaaaggaagggtggtctcttggaagagggcagaagaggcagcaagggccagggacctggggacatggggtggcacgtgggaagcactttttgttgtgtgtgtgaatgtgtgggaccttagacctgggaaggggaccccagtcccaacccaacccctctctctagctggctcggaggttccttttgatgtgcactcccccggggctcagagtctgccgctgtgtattcagtgaggctccactggaccccctgcggaggcaccgtgtagacaaagaatccggtggccaggcccccgcccgccctcatggggctacccgtctgtcgcggggaaggaggaggaaatctccgatccaggcactgtgccattcatttttgcttgaaacaggtcttggggctgccaggcgggagtcgggagccggaccaacctgggggggtaaagggagaggcgaagccgttgcagcggggaagcaggtggggaagtgcgaagggccgaaggcctaacaccacagggcttatggaggaacagtgcaaagggagcacatagggggctccaaggcctctgacctggagaggagggcgtttaactttctcctaggagctgtaggaaccgcagagcggttttaggcgagctccctagaggccactggaaggctggacagcagagcctggaagcaggaaggccctagcgtgggtggtgggcgcaggagtaaatcggatttctttccactgcccagcctagtttgctggcatagaggctgcatcctggaaatgcaggaagcccctgacctgcaccgagtaagcgcatagtaggtaagcaccagatgttaatctaacacacaaaggagcgcaggtgcacgcggaggtcggctcagagcccagcggcgcgggcgcgccccctggcggcagtgctgatagcaaggcgggaggtcagcaggcgaggaaggggtcgcgcctggtcccactccgctccctgcgggcccggcatcctcaattgttgctggtgagcagcccggatttcggaggatcttggttaagcaggtgccctcctgagtgaatgcccttaatctacctcgcaatcccggagcttagctggggataaggggtgcatggcttcaggctcccctctcctctccagacaggcggagggcgagcgggcccaggtgatgccggtccagggcgcactggggcaccgccagatccaccctgcggatgcctccctcttccgctgacatatgggaggctgccagcggcaggcggatgtcaccagttcttcctggatcccgagatcacaggggccgctgtgggcacctgagaggttctccctgtggcagtagttcctcctgtcttagctctagctccccagggcattcagttttatgtatttatatatatatgtatttataataaatatgtatttataataaatatgtatttataataaatatgtatttataataaatatgtatttataataaatatgtattatataataaacacatatattatatattatatattatatatattatattatatatatttatatattatatattatatatttatatataatatattatatatatttatatataatatattatatattatatatatagaaaggtggaatttcattcttgttgcccaggctgtagtgcaatggcgcggtctcgactcactgcaacctctgcctcccaggttcaagcgattctcctgcctcagcctcccaagcagctgggattacatgtgcccgccaccacgcctgactaattttttgtatttttagtagagacagggtttcaccgtgttggccaggctggtctcgaactcctgacctatatttttaagacagagtctcactgtgtcgcccaggctggagtacagtggtgcagtctcggctcactgcaacctccacctccccatattcaagtggttctcctgcctccgccgctcaagtagctgggattacaagcatgcaccaccatacccagctaatttgtgtttttttggtagagacagggtttcgccatgttagccaagctggtcttgaactcctgacctcaaatgacccacccatcttggtctcccaaagtgctgggattacaggtgcaagccaccatgcctggcctccccagagcattttggaaagcgatttgcggtgaaagtcctttagaagggagggaatggggtggggtgggggcactggccggttgcctgtcatctctgagtccctggcttcggttgtggagtggagataacactttccaccttgtagggagctgtcagcgttaaatgagaatggtgctgacggaatgccagactgcggatggtgaatacaaaatattgggtttccttcttctcttgaggcaaggagtaagcctctctctcaggtctctcttcctgccccagtcagtgtctgctaagcagtcccccttcaggcgcccaggagccttctccagaaggatttatccgggataatgttgtctgatgtccccttccaagacccacttcaaaatatccacttcagagaggcccctccagaccccttgccactccctagccctgtcctgtcaggcctcttattcagctttattttccagcatagccctgacactgatgtgattaatatgtgattacacatattattatttttttgagacggtgtcttgctctgtcgctcaggctggcatgcagtggtgtgatcttggctcactgcagcatccacctcctgggttcaagtgattctcttgtctcagcctcccaagtagctgagattacaggcgctcgccaccatgcctggctaatttttgtatttttggtagagacagtgtttcaccatgttggccaggctggtcttgaactcctgacctcaggtggtacgcccgccttggcctcccaaagtgctgggattacaggcgtaagcccccatgcccggctgattatacatactacatagcagacatatctgctcagtttcttgcatatgttgtccgtctccaactgtgaaatctccacaaagaaactccctccacaagactgctgaacccccagtggtgagggatccagcacttagcagcccctcgaaaacactgttgatgatgggcccagaggagagggagcaggcagggccgaggtctcagatagaagggccactgactcaggtctgggctccctgtggcccctcagggtcctcagtgcccctatcttgagtggccctggcccctacaactccaacccaccccagctaccctgctctgtcgcttggttcctgtgtccctttcataggaccctgtgctgcctccagtgggatgagattaagggtgggcagcctgttgggaagtcactgccacatgggggcatctggggcttggtggcccctcgtgctgcctctccagccatgtgccacacctctttctccttccctttctttctcttcagcctccctctgtgcccctttattctgccattgcctcataaccctgagccccatccctggacatggctggcctgcccaaggcttttggggctctaacccaaggccagctcctagcatggctgtgatcctacctgaggagttagagccagacctctgtgtgtggctgccacggtttctctcagtcacctggaactagagctcctgagttttccttccactcccctgtgtatgggacataagcaggcagggaaggggagggagccctggttgcaacccaggaggggcttggagccatctttggtctcttctgtctccaaccttagtcacgatgggcccccaccttccgcctgggctctgagggcggaaagtgtctgtatttctcatcgcacacattgactgcatgcctgctgtggacaaggctccacgaggaatgggactaccctcaaggagtctgccttcttccttataacccagctccggttgatgcacacagtaggtgctctgtgaatttcacctggtccatttcttcaacgcatcttcatggagcaactctgtgtgcagctgccccttggcagctgagcactgatgagcaaaagcagcccaggttttggcctgcaaggaacttgccatctgctggggacagtcattcatcagaggaccaaatacgtaaatgtttccttaaaaaacaaaaccaggccaggcatggtggctcatgcctataatcccagcactttgggaggccgaggtgggcggatcacctgaggtcaggggtttgaaaccagcctggccaatgtggcaaaaccctgtctctactaaaaatacaaaattagctgggcatggtggcgcatgcctgtaatcccagctacttgggaggctgaggcaggagaatcacttgaatccaggaggcggaggttgcggtgagccaagaccgtgccactgcactccagcctcggcaacaagagctaaactgtctcaagaaaacaaaacaaaacgaaacaaaacagaggtgtggaagttctctccatctcaggggtcttgcggggaagacttttgtgggggcacattagggagatagaatagaacaagcctgataatatccttggagatggtgaagaaatttctagtgaagtcctggtttgcaccttccagaactctgccaactaaccaccttctccacagaccagtatggccagtagctgtcattgctgggacctcagggtggccagctatgggccctgagtcctgggagcctaatcacatggatggaggcccagtgggctgggaatggggtcacagctgcctcactggcaagggcctaggcacagctggcacagacgttggagggcccttgggctaagcagggacatctgcctggcatttcccacatcccagcaggacccacctcttatgcacctttgtcttggcttctagataaggcctgaatggggattcacatgtctgactgggaaatcctctctgagtggttgcgttagagcccaggtctaccacaaccccagtgaatcccagctctgcctcttactatgtgacactgagcatattatctaacctctctgtacctgcttcatcaactgcaaaatgggtataataacacttgtctcaaaaagacaattgcctattcagcagagtgatagctgctgtgtttgaaatggcacctgggacatgtaaaatgatcggtgagcatccactccctccctctgtggcaatcagctgctctttttttttttttttttttgagatgaagtctcgctctatcacccaggctggagtgatcttgtctcactgcaacctgcaacctctgcctcctgggttcaaatgattctgctgcctcagtcctcctagctgggactacagatgcaagctaccacgcctggataatttttgtagttttaatagagatagaatttcaccatgttggccaggctggtcttgaactcctgacctcaaatgatccacccacctcagcttcccagagtgttgggattacaggcatgagccaccatgcccagcctcagctgctgtttttgaacttctggaagacaggcttctgtttagatttagtgtagctcacactgctggtggtcccttcctccaggatggcagaggcccccagtttgttctggtctttactcctcccctaccttgctcagaggtaaatcctgactgatctaagtcaatcacggggacccattctgcttgccagggattggcctaaactgggtgacatgtgcctgagggaggtcagctgaagggtgcaagaaggtttctgggaagagtttttggggctcttaaaatgacacacagtaagaaatatcttttccctgcttttggacattgttgttttgggttgggatacctggagctgcagcagccattctgtgactatgaggaaagctgcctgaagatgaagctgaccggcagaggaagacagagccaagagagagaaacaaacttcatctctgacaccattgctgagacactaactgccttcagaggagtcctgctttggaacttcttgtgatatgaaataatacattttccttgttcgttagcccacttgaggctgttacttgtagccaaaggcctcctaactatctgtatcctcctcacccatcatgtctagtgtagggtagttggattaaatgtggagactgacttacaaggtgagttgcttttacttaaggatggatgagtgttaggatttctttttcttttcttttctctttttttgagacagaaatttctttcttttttttttttttgaggcagagtcttgctctgtctcccaggctggagtgcagtggtgcaatctcggctcactgcaagctccgcgccccaggttcacaccattcccctgcctcagcctcccaagtagctgggactacaggcacccaccaccacgcccagctgatttttttttatttttagtagagacggggtttcaccatgttagccaggatggtctcgatccgctgacctcatgatccgccgacctcatgatccgcccacctcggcctatcccaaagtgctggaattacaggtatgagccaccgggcctggccaacagaaatttcttttcttttctcttttcctttctctctgtctctctctttttttcctttggatttctttttcttttctctttttttgagacagcgtctcactctgtcactcagactggagtgcagcagcacaattttggctcagtgcgacctccatctcccaggatctaatgatcctctcacctcagcttcccaaggagctgggactacaggcatacaccaccacaacaagctaattttttaaaatttttggtagagatggggttccatcatgttgcccagccagggtggtcttgaactcctgagctcaagcgatccatccacctcagcctcccacagtgctgggattacaggcatgagtcaccacgccctgccagggcttctttttcttgatttgagggtttgtctaggtgggggtgaggttgcaactggagcctggagctgggagcctcattctgagatgacttgtggggagaaaggaaacaacaaaagggagggtgtagggttgaggtgaggtttaagatgcatccagaatgtagttctgcccaggtcgggcacggtggctcatgcctgtatttccagcactttgggaggccaaggcaggcagattgctttgagctcaggagtttgagaccagactgggcaacttggtgaaaccctatctctacaaaaaaaaaaaaaagaattgccaggtgttggtggctcgtgcctgtagtcccagctactcaggaggctgaggctggagaatcgcttgagcccaagaggcagaggttgcagtgagccactgcactccaacctgtgtgacagagtgagaccctgtctcaaaaacaaaaacaaaacaaacaaacagaaagaatgtagttctgcccagtgctgcctttgcattttcctaaagaggctgcaacttgactgctgatgggtttgaggttcatgaaaatgttttggaattagtggtgaaggttgcacaactttttcaatatactggaagctactgaattgtgcactttaaaatggtgatttttttatggtgtgcaaattatatttcaatttttttttttagacagagtttcactcttgtcacccaggctggagtgcaatggagcaatcttggctcactgcaacctcagcctcccagattcaagtgattctcctgcctcagcctccccagtagctgggactacaggcatgtgtcactatgcctggctcatttttttgtatttttagtagagaaagggtttcaccatgttggccaggctggtctcgaactcctgacctcaggtgatctacccgcctcagcctcccaaagtgctgggattactgtgtaaggcaccacgcctggcctcaattttttaaaaagagaaaaagcagcagcccagccacctgcctcctacagtctcccctctgcccttcattctcaggtgtctaggagccattctcaggctccctgagtgtgtttcggggatggaggggcacagccccaccagccatgccacacaggagcacttcctaaagtctctgctgggaggggctggtggaagccttgcctggggacactgggactcactctttcacctgaggggatggttatctcctaaggcctggtcctcactggccaaatagcctcaggttgggatgggagtagggggtgggggcaaagtgatgctgtggtggggtggggggagcatgagttctgtgatcagaaagaacaagttcacatcctggctccctgctgctgagctgtgactttgggcaagttatctagatctctctgtggccgtttcttatctggcaaatgggtatactaattccacccttggcagggttaaatggcatagtttacccaaaaagctcagggcatctagtagataacacaggctgacttcctaagacctgttattatcatgagaccaaacataatggcagaatcctaaccaggctgtcttagtgattgaggactgttggtgacgagatgttcccagctctcttgcttttctcagactgcccaaaagccttcctcccctcatcctcatcacccacccctacctttgcctaccatagcctccccacccccacacccagccttttgctatgcacatcagcaggtgtggtaatgtgggaaatcatatttcctttcttttttttgagatgaggtctcgctctgtcgcctgggctacagttcaatggcacaaacacggcttactgcagcctcgacctcccgggctcaagcaatcctcccacttcagcctcctgagtggctgagaccacagacatgcaccaccgcacctgcctaactttttattatttttagagatggtgtcttcttcctacactgcccaggctgatctccaactcttgggctcaggagatcctcccctctcaaagggctgggattacaggcatgagccaccacacctggccagaaatcatatttctgaatcccaaatcagagtacatggcataaccaaaatatttattcttttactttattttcttttttctccagaatttaagaaaatctgaaatgaaaatctgaaatgtagtttggtcaaaggttggacttttgggagcattttgatggctagtggtgacacttctcatggctagagagggccacgggtgttctagaaggtgaggcatgggttaaaccactttgaatcacacatggagaaagctcatttattcacaccccctgttccattctccttcactccttctgagtatcctcaaagaaaaagtctggttggtcctaatacgacttcagcacctctccaacacttgctaagatccttttctaataaagagagaaagtcacacattcagagcctttgcagggccatagtgtctggttagaatgaaacctcattgttgaaaatgagtaaatctaaaatcttcttttcagttgacgttattaagaacaatgcaaatcaatgtaaagaaaagtgttcaaaaaatagcagaacaggtatgcatgcagctatagagtgggggtagcatggaaatgcctggagtctggaaaacaccggaacatgggacaacagagctgagggcttgcagtcagggtgcgctgtaagtgcctgaccatacagtctgtgtggtcagggcatcttggttggccagagaccctgtgggtgagcgaggctagagctggcagaaccccagaattgcacccggaagccacctggctatgagctgagattacccccagcatctgctctgcctcaaggtaccagataggtgatctggggtggcccatccagccttaagagtgggttggatgacagaggaggccagcactaggcccctgtgactcggatactcacgttggagggagaggtggaggacgaagcgtaactgtcttccagttgtccagaaaggctgggcaaggtcctgggtcaccttctctgttctaggcccatcagaggctttcttcagggtctaggagaagagggggagggccccagagtggcggggtcaagttcagacacccctgagcactgctctggaggcaggcaggtcaggcccaaaaggtgcgtgggcctcagggagccacttgttcccctccgggtcccctccagtgaagagccacagaggaggggactgggaaaccagggttccagcttcagctttctcctgactggctgtgtgtccccggacaaggcactcaccccctctgggtctcagtgtccctgcaggttgaaactgccaaatgaagagttctttgggtcctgtatgcattgagtgaatgctctgcttccccgtgatccctgaggccaacaccctttgtgttcctgtgccctttcagggcagaccaggacactgtgccagagctggctgcaggcctctggctagagctaccccagccttcagcagaggcttgtcctcctaggtgaagggttgtccatgcccagcctcgtgaggcccgcgtggttttgggcagtgcccagtggcactattggcaggctccaggcactaaaggaagagaccgagaccctgaaaggtgggggaggaagacagagaaggaagaggtgcctgcagagggggtgctggtggctgcccctcacaaacgtgccaaaggttgccaacttgagtttaagccttggttccagaacacaaagcctcctctctgggggccttgacccctcggagcccccaccccgggccggctgagctgcccggagggaactagccccagaagggcctggttgttggctgcgaagtggctgggagggaagttttaatgatacacaacacaagacacaggggggaaaagagagaggggggtggtggaggagagaagggaggttggggggagaaagaaagacctcctgccaggcctgttgccaggaaacggccaggcagccagaatcagccctgctcttttcacagttggctttaagcaccgagagaaagcccgggccataaagggggacatgtgttgctgggtgtgtaaggctagcctctgcagttaggggagcccctgcccccgcccctgccgctgcaccgagagccccttgagcccccagccctgcctccacgcctggggattatggatgaacgattgagctgccgagcaatggaaaaggcaggggtggccctggccttccaatgtcgcagccactttgggggtgaaactcaccagttgggtccccaggaagctggcaggggctggcagggcagggagatctgggattccaacatggcacgtccacagaaaagtattcctattggctctgcgtggtccatccaggttaggggggtgaggtgtctggacttctaggaatcctcaacagggcactcagaagggagctgacaagtcccagaaacctgcattctggctcctggttcttgtcacggatgccatggtgggaacaggcccctttaggctgtgccttggcacttggggactgtccctgcagcgcagtgactgctgtgtccctgaagagtccaccacacagccaggaaagagcaaaaagagggggagggttgttgacaaaacgagctcatggccctggctgccaatccagagtgatgtcagctgaggagtgacatggtgctctcagcacagaggacgtcagcaaaccgggaagcagcatgtgcgtggaagctgggcctgagccctgacgcttcagctgagctccctgggtgatggctccttccacaagttctaacgtcccactgaaagcaagctgcaatttctgttgcttcttgtatcaattgcatgaaaggacgggcagtttcttttgatcctctggcatgccaaggcctgaatgccagtcctgggagccttaccagccctctaagaagaatcagaaggtgagtgttagggaggaagggacagccaacccaccccgactccccatctggtcacctcactgcctgacttctctctgagctttccgagacactgctggaggccgacctgagctcaaactcaaaccccagtctcctgctcagtgtggtgggcagccctgcttccctggctcatggagtgagtgagggtgtgtgtgagtcagttctaacaaaatcaagaaatcactgtatcttccaagaaagctttgactcagtgcatgtgtgcactgagctgtttcccacgtgagtgagcgtcctggaaaacaggcctgcccggggaagaagtgagccagtctgcctgctagaaactgctgggggctcctgatcgggaggcttgcttttccttcaacttccttcgcctctttttctggctggagtgtgtggttctgctagttctggagtctttcctgtccccattctggaccatgtcccatcccaggtatcaagaatggctcatacctgtaatcccagcatcttgggagtctgaggcaggaggatcacttgaggccaagagtttgagaccaacctgggcaacatagtgagaccctgtctctgcaaaaatttaaaactaagtcaggtgtggtggcatgtgtttgcagtctcagctactcgggaggctgaggggagaggattgcttgagcccaggcatttgaggttgcagtgagctaggatggcaccactacactccagcctggtcgatggagtgagaccctgtttcaaaaaataaaaaaagaaaatgtcttacttccagaggggctgaatctccatgaggtggtaaccaaaacgacggatttgccaactctcagggggaagtggtgtcctgggcagtggctggagaagcaggtggtgcctgggtctgatcgcaggagggaggccttctgggttctgcctctgggagagggcaggctgctggggagggcgcgcattaggagatggagagttaggccaccaaggagcccactagggcacctggcaagttctgctaggcctgccgaggcatggctgggctttacaacagggggtacggagctccttgagtggaaagctcctctcgctggcttgcccctgatttcatctcaagaacggtcaactctagcaagcaaatatacctcctgggctgtaggtaggggctcagccctgtccctgaggctgggcacaggcttggtccttctcgcctgcctcctccccttccctgtcctctgtcacacccctcccccatgcagaggagccagttttaacctggaaggttccctctgccctctcacaactcagcacccctgttattccttcagaacccctggccagctcctcaagggcttcccccacgctaatatactcttagagtctgtggcttctgtttctctagcttgttcagggaagagtctctggaggcccaccttacccccagaagcattccaaaaaatggccattgagctcacctgtcagtgttcctcccccaggcagcatcaaactccctagattggccctcagtctctcttcttcttctccttctccttctccttcttcttctttctggagacaggatctcgctctgttgtccaggctgcagcgcagtagtgcgatcagtgctcactgtagcctccatctcctggggtcaagtgatcctcccacctcagcctcctgagtagctggcactacaggaacacaccaccacacctggctaatttttttttatttttagtagacagatgaggtcttgccatgttgtcccttattcttttttttcttttttgagacagagtctcactctgttgcctaggtttgagtgcagtggcacaatcccggctcactgcaagctccgcctcccgggttcacgccattctcctgcctcagcctcccgagtagctgggactacaggcacccgccaccacgcccagctaatttttaatatttttattagagacagggtttcaccgtgttagccaggatggtatcgatctcctgacctcgtgatccacccacctcggcctctcaaagtgctgggattacaggcatgagccaccacgcccagcccagtctcccttattcttaatgaggtgaccatgagttaatctcttaggtccaccctcacctcctccaggaagcctccctgacttacccctcctcctttgtgccttctagcttctcatcagtgtagtcattcctgacctacagtggccctcagcagttgccaagatttgtccccaaagctcagggctggtggtcaggtgggttagggatgagttgttaagggttgggagaatacatctcctaatgcaatgaggaacagatccagctgggttggagggaagggaggagggcctgcgccccctcagcccccttcactccccacctctgcacccctgcctagcttcttaaccaggaagttgagctaccttcactaaagaagagtggagacaggagacccggcccttctctctgggacaggactctcctggtggggctcctcagaggtgagatcctgcctctgggcccctgggagaccctggaccttaaagttattgtgcccacacattctggatggggcctgcgaggatggtcagggtcatagtgccacctgctggggctcccaggaacagcagctggagagacgctgacgtgtgtgtgtgtgtgtgtgtgtgtgtgtgtgtgtgtgtgtctcggttgtggtggtggcggggcaattaataacacctcaccacagatcttaaaattcgcctgatattgaacccttaccccctttccaaggaagcagccaaaagagtgcggaggaagtgatattggaattcaactggggctcccagggaaatccagggctgcagggacataattgcattccttggaactgctgttttttgaacttcattcatgaagcctggtttctagggatgctttctcttttcatggacccagaaggaaagtggagatggttcttcatgcttctatgtgaaatggggtttcaagggcaaaaaacaagtaagcactttgaatatctttgtgtttttttacactgataagaggaagaaaagtatgtcacattgtaaatgtcgatgattagaaacagtccaaggtgatcattgtaatgtcaatttctgaagcagttgggagaaataagtaggataatgaaatgaatcagcacagtgcctctcacttgctaaatatgccgcatgttgggaaattcattgataaaatgaaacccactgtggagaaagtgactggccttcctggcaagccaggctggaggtgagcagggttggccagggtcatggggtgatgtcttggttggaagccaccaggtgacctgtgtcctgttgacacacaagtatgctgcttagtaactccctggaattatttttaaaaagctagatgtgtgaataaagaatttgggggattacaattttggtttgtaaatgaaccctttgctttaggaagaactcagcataggacccttgcaagtatttctttttctttttttcttttttttgagacagagtctcgctctgtcgcccaggctgtagtgcagtggcgtgatctcggctcactgcaacctccacctcccaggttcaagcaattctcctgcctcagcctcccaagtagctaggactacaggcactcgccaccatgctaggctaatttttgtatttttagtagagatggggtttcaccatgttggccaggctggtcttgatctcttgacctcgtgatctgcccgccgcggccccccaaagtgctgggattacaggcgtgagccaccgtgcctggctgaaccttgcaagtatttcacatgatatttgttttgcccccttcatccctttacttatgtaaccaaactccacctgcagtgacaaggctggcctgataacctactcatggagccaaatgcagatgcttcttaggcagaatttggagtataaatgggagaatatttgggggactggagggtgggactgatgttggggaatcagcaagcaccaggccaccatcttgctgtatgacatttgtttccccatcgaatcctcactagaaccccatgcaagagctgccgctgccaccctcgttttacaaataagggacttgtggcccagggaggctgtgtgacctgtccgaggtcatagtcctaataaacgctagaggtgggatgtgaacccagagagtctggggtgactccaaaggactgaggctgggaacacaggaaggtggtgatgcccctgctgggaatgtgcctgggggaaggtttggagggatggctcatggtcagtgggatttagtttcccactcaccaggcagaggactgacctggtatatgccttcagggctgatatgcacaattgtgcatgttgtgcactgcaaaaggttacaccacatatgaggacactgtgcacatcacggccatatttgcagtgattgttttctgacagttgggaaaaaagtgcctggaggaggagggacctctttctaaatcactcagaggggcttcatgggtgggtggcgttttccacgtgtacatcaccgtctttctccacccaagggagtgagcaggtactgggacaactttaggccattgctccaacccctgtgttgagggggtggaggaaccttttgcattttctgccccctcttcacttctcccagaagtcatgggaggggcaacagacagcaaaagccttctctgtgtcactggccctactgttttctctctgagacatctggctgaaaattcaggctcttgccatccctgtggaaacaggatcacataattggtggtaaggtggggagggaaggaaggagaagtgaggaacagccgagtgggtcagtggatcagaagagatagaacggggcctgccttaaaaaaaaaaaaaaaaatcacaggccaggtgtggtggcttatgcttgtaatcccaactttttggaaggccaaggcaggaggatcacctgaacccaggagttcaagaccagcctgggcaacatactgagaccccatttctacaaaaaatgaaaaaattagctgggcatggtggtattcgcccataatcctagcttctcaggaggctaaggcaggaggatcgcttgagcctgggaggtcaaggctgcagtgagccatgatggcgccactgcactccagcctgggcgacagagcgagaccctgtctcaaaataaattaattaattttaaaaattaaaaataaaatttaaaaagtacatatacacacacatccacgtatatgtaaaatgtcatagataatttgggttgttttaataagcatatatcagccttcaagcagatgcagtccataaaaatccgggtttacaaaaacagataatttggcatagaggcctgtgcacagagaggggattactcaccatataaaatggtttccaggggcttgttttcttttctaaagaattttgttttgttttctgagacggagtcgcactctgtcgcccaggctggagtgaagtggagtgatcttggctcactgcaacctcttcctcccgggttcaagccattctcctgcctcagcctcctgaatagctgggattacaggcgcccgccaccatgcccagctaatttttgtatttttagtagagacagactttcaccatgttggccaagctggtctcgaactcctgacctcaggagttccgcccgcctcggcctcccaaagtactgggattacaggcgtgagccaccgcacctggcctctaaagaattttaagtgaatttccaagagtttcaaagatgattgttatgtttatggaatgcttattctattagctctgaactcatgctaatatgtttgtggccatgcgacccagcatacactctgtccttgtggccactgccaatgggaccagctgtgggtacctgacccttggcactcttagcccctggcgggtccaggcagcactggcgtggtgtccacttttttctcagacacttgcatcaggttgtatggtagctgccactgggccccaaagctgtatggctgtggcacaacgcaggcgtcaaggcagccatgactgccatgcacaggctgtaaattctttatatatatatatatgtttttttattatactttaagttctagggtacatgtgcacaatgtgcaggtttgttacataggtatacatgtgccatgttgatgtgctgcacctatcaactcatcatttacactaggcatttctcccaatgctctccctcccccagtcccccccgccaagaggccccagtgtgtgatgttccctgccctgtgtccatgtgttctgattgttcagttcccacctatgagaacatgcagtgtttggttttctatccttgtgatagtttgctgagaatgatggtttccagcttcatccgtgtccctgcaaaggacatgaactcatcctttttcatggctgcatagtagtccatggtgtatatgtgccacattttctcttttctttctttctttctttctttctttctttctttctttctttctttctttctttctttctttctcttctttctttcttttttctttcttctttctttctttctttctttctttctttcttttctttctttctttctctctctctctttcctttctttccttccttcattccttctttctttctttctttttgagatggagtctcactctgtctctcaggctggagtgcagtggtgtgatctcggctcactgcaagctccgcctcctggattcatgccattctcctgccttagcctcccgagtagctggtactacaggtgcccgacaccacgcccggctaattttttatatttttagtagagacggggtttcaccgtgttagccaggatggtctcgatctcctgacctcatgatccacccgcctcggcctcccaaagtgctgggattacaggcgcgagccacggtgcccagcccattttcttaatccagtctatcattgatggacatctgggttggttccaagtctttgctattgtgaatagcaccacaataaacatatgtgtgcatgtgtctttatagtagcatgatttataatcctttgtgtacatacccagtaatgggatccctgggtcaaatgatattgctagttctagatccttgaggaattgccatactgtctaattgaactaatttacactcccaccaacagtgtaaaagtgttcctgtttctccacatcctttcctgcatctgttgtttcctgactttttaatggtcgccattctaactggcgtgagatggtatctcattgtggttttgatttgcatttctctgatgaccagtgatgatgagcattttttcatgtgtctgttggctgcataaatgtcttcttttgagaagtgtctgttcatatcctttgcccattttttgatggggttgttttttcttgtaaatttgtttaagttctttgtagattctggatattagccctttgcaggctgtaaattctaagcagcaggaagtaggtgtgagtagaagtggaggcagaaagcagccggttctgtttccaactgcattctcctttcctgtgcccctgtgtcatcaccatggaacgcctttcccgatgctacttccaacaggaggcagagggtgggagaattcaggttggaaggcttatccctaggaaagagggtgccgacagacaaggctccttggaagcctgacaaatcaaatttaccatttattgagcacctactatgtgacaggaacatgacacgcatgatttcatttaatcttcacaaccagcccaaagagcagctttctccctatttacagtcggagaaacggaggctctgagagattgtaagggacttgcccacggtcacccagctaggaaggaaagccagaaggccagcctaggtatcctggcggtcctggatcagagacactgctgtgaggcttcccggtgggaagaaggaaagtcatgcatcgatattcatcaccgagtgagagtgagagttcagccctgtcccaggcacctctgggcgggagggtggagaatccgaaagaaagaggcccgtccctggtcctcaaggtcgtgccaacaggccaactaagccatgtcccaaattgagagcgggttaaggtgggggcgtggggacgccctgacgcaacagggcttcggagaagggagcgctgggggctgcaatgccagaggattccttgaggagaaggggctggtggggcgggtaggggctggccgggagcaggaccgggaggaactggaccctctggactggggagtgcggggtagatgaaggcagaggagatggaggttctgcagtgtgaggcaggcggacagggaagcctgcatccagctgagagaccttgagcaaccacgtcctcctctgagctccgcgtttgccgtgtgcaaagtgaaggggtaggccgaccccgcagggcccttcttgcgctcctctgcggtgtgtgggggggtctctggtccgcgagaggacagtccctgccgcgccgagcgtcctccagcgtccgcggccgccgcgagcagcgctgaccggcagggggcgctcctgcagaaggctggccgcggtggcgccctcggcggggcctgggctggcctggggacccgggaggcctccccctccatccctccaggtcctctcccaccacttgccttctcacaccgccccttcccactctatgctctgggattaaaggcttgggaagttgctggtatttaggtccttgggcaggccacttcgcctctctgtgcctcagtttcttcaggcgcaaactgggttgtgtgaggaagagatgagttattggtcaggagagccttccagccacaggtgaggtagatatgccgctgctgcacaccccaatatcattcctagggcaggggctgctgctctacaacctcagggttacagttagctttaaatctttatttatttggttgttttttcagacagggtctccctctgtcgcccaggctggagtgcagtggcgcgatcacggctcactgcagcctcaaactcctgggttcaaaccatcctcctgcctcagcctcccgagtagctcgaaccacaggtgcataccaccatgcccagctattaattttttttgtagagatgggatcttgctttggtgcccagagctggtctcgaactcctgggctcaagtgatcctcccatctcagtctcccaaagtgctgggattacaggcatgagccaccgtaccctgctttaaacttttattcaaagtccttttgtgcaaagatagaaataattcctggatcctacagagtgcctggcatgatgagtgatgctcaaaacgtagctgtggaatgattagttttttgaaaccatccagacagaagctatgagaaaatcagacagtgcacctcttctgaatcacactggaagatgtccacattcatcttcacatttctcaccactgttctgtgaggaaggtggacagggagtgttgtatccattttatggatgaagaaaccgaggtcgcagaggaagccagagacaagattttaagttaggacccagggttctctccatgcaacctcaggtaaattatcctgttgttgctagtgactcctattggagacatgtggtattgcaaccaggccacattagacactgaaggcacctcatgaggaagaaggtgggcacatcctgggtgccaagcccagagagggagaaactagggtagatattaatatcggagctgggggaatgaaaatgatatttcagaatcaacaacagattggaaaggcttaactagtttaaaacacattccctattcttaagtccccaacactttttcaacctcctctcactccaaagtagaacttaatgtagcaaaggtatgctttgtagggtgaacccttataattataatgacaaccagtgggaaaacttggtttcctttcaaacgtttgtgtgactaattaggagggactattccattcgttaaagtgaagaaagaaggactgaaaaaaaaaatcactctgcaaaatccagctcaaacattgctgcatctcagttgccattgtcttagctacctcttccctggaacaatgaattgattgtcttctttcctgggttcctgcctcatttggtactttcttctctttactgctgcacagtcgttaaatatgtgtctttggtgccagctccctgggttctaatcccggttctaagcttactagctggccagttacttgacttctctgtgcccatttcctcatttgtaaaatgctgtgagcattaaatgggttaacagttttataggacttagaacaatacctggtgtaatgtaagtgctcaataactagtttacacttatatagatatgtcagaatgctctctgtatttatttatgtgtctttcccaacaaactgtgtgctcctcaaggacaagaactgacttcatcatctcctattccagggtttagcaccagatgcttattcaaagtatgttaaactgaatattatgtattcatactttattattattttttctaagacaaggttcttgctctgttgcagttcttgctctggagtgcagtggtggcatcatggctcattgcagttgcaacttcccatgctcaagaaatcctcccatctcagcctccagggtagctgggactacaggcatgtgccacaatgcctggctaattttttttttcttttttgtattagcagggtctcactgtgttgctgaggctggtcttgaactcctggcctcaagcaatcctcctgcctcagtctcccagaatgctaggattataggcatgagccactgtatccagcctatactttatataaagtagaaaatatgcagtgaggtggagttagccaccttttttttttttttttttttgataagttaagcctcagcttactgcttcccagagataaaccaaggttcgagtctctcctttgtttaaagaaaaacatctggctgggccactgcagtcctaccatgagttcaggaaaacgtgctatggtccaactgtctaccagtcaggacacagttaatgagcacttcctgtaaacttatttgtacctgcagttctgataatatgacctggaggaaatggtgtggtggtggccgatttctaaaactaactgcaaaggattgcattcctctaggcacctatgaacttcaagatgggacccctttcctctcgtccttctttttagagagtttagagagcaagaacttactcagatgaaaacaaactaaaagatgttgagaatgcctctgtgcagacccaaatctataggatgttatttatagtaaattatggcatatttttaaacttctagtccctaagaaagttgttttcttgcctccctccttcccttccttccttccttccttcctctttcttctttctttcttttttattttttggagatggagttttgctcttgttgccccagggctggagtgcaatggtgggatctctgctcactgcaacctccgcctcccagctgcaagcaactctcctgcctcagccttctaagtagctgggactaccggcatgcaccaccacacctggctaattttttgtatttttagtagagatggggtttcaccatgttgaccagtctggtctggaactcctgacctcaggtgatccactcgcctcggcctcccaaagtgcttggattacaggcgtaagccacagtgcctggtctccttcctccttcttttgagcagtatccatagctatgtcctgtgtggaatgcctttctgttgtaaaacaccccaacgtagagtctttcactagtgctttgcccataggggacttcacggtggttgaagacagaatgccctgctgctccgtgccacctgcccagccatctcctagtctctaggtcagctcactgtattctatgctcctggaagtggtaaccagggctggggtgggggttatattcacggtgagcccagtgcccaaacagagcttggacatatatgtcacctgacatacatgagtcgacttacagggacaatggagtgagttatctgaattttttttttttttttttttttgagacagagtcttgctctgtcaccctggccagagtgcagtggcacaatctcggctcactgcaacctctgcctcctgggttcaaacgattttcctgccttggcctcccgagtagctggggactacaggtgcccgccaccacacctggctaacttttgtatttttagtagagatgggtttcaccatcttggccaggctgctctcaaactcctgaccttgtgatccaaccacctcggcctcccaaagtgcagggattacacgtgtgagccactgtgctggctttttttttttttttttttttttgagatcaaatctcgttctgtcctccaggctagagtgcagtggtgtggtctcctttcactgcaaactccgcctcctgagttcaagcgattctcctgcttcagccatctgagtagctgggattacaggcacctgccaccaggcccagctaatttttgtattttcagcagagatggggttttgccatgttggccagggtggtcttgaactcctgatctcaggtgctccacccacttcagcctcccaaagttctgggattataggtgtgaaccaccgtgcccggccatgttatctgaaattgagagttctcctccaggtcactacttacttacctataactactagacagaactggactgctcaaagcactcctgctagtttcaaccgtttcagtacagatggctcatcctgtctctcatgaacattataaaatcagaggcagggtttgtagccatcaataagtcaggtctgaccttccacagtccaatgtttattcattcagttattcattcattaattcagttatttaacaatgtttttactgtgggctgaaactcagtaccactatgggaggaagtgtgggatagaaaagaaacaggggacagggtctcagatcttgaggtgtctgcagtctacacatagcagggatgcctaatctcccaaactcaaggacagtgtatatcaacataggcactggcacaaagtacagttgtgccaataaaggttgtagaaccaatgtggtgagtgagcagaggcaggaattgtcagtcaaggtggggttccagctgcccttggccacagaagcatggctgggtggggggccaccaaagggctgcttctctgcattcagcctgccttggctgaactcaaagatgctgctggataaagggctggagaatggccttgaataggcaaggggcaagagaaggtgggtcccacaccgtcctcacaacacaattcaaagagttctgtgaggaagaagagggagggagggaggaacagaagtgagaaggcctcgaactggaagtgccatggggagtggtgagctctgccagctctggagtgagcttcccaagataggacaggggcccttcccgcagaaggacagatgagtgaaggtcacagaggactccagtccagaaatactgccctgcccctcccaaatacctttcctgcaaatgcttaaagttccaccattggagatgtattgttatgtatttttctcctccccactttcagtaatttttttcattataaatgtcaaacattcttgtcatagaaaactaggaaaatgcaaggaagataaaaacatttcttaccccacactcccaacctccaaggcagcccctattaacattttggtgtccttctctgcccccttttttgtcattttcaggcatggctgtgagttccctggaggggattctgaagcccactttccccacttagcttcagtcctatttcagtctggtgttccagaaaaatcaagtcttccatccccgagagccagtgagttctatgaccttgaggaagtcattcatctttctggactttagtgccctcatctgtataatggggacaatcatggcccacatgctacctcacagtgctccagagtcaatgctagtgcaatgttgcaagggcattgccaatacagttcaagtatgtggggctaggactgatgggagtggtcaggactcagccagtcatcataaggctatgacaagaaggccaggtcacctggaggatggggaaggacagggagagggacaggtgagcccacacccacaccagtcctgtccaggctccccaggaccagccctcctgggcagctgtgtgtcaggtcagcatgggcaccttccctcggagctgctggggcatcatctgttccacttcctgttgggtccagagttcatttccagtgcagtttgagggagattagaggagagagccagcctgggaagccgcatttccacttgggaggcacaggagatatggagccaaccaaaggcggatggttcctgagggtttgtttcaggcagggtgggctggcctgggggcaggtgccgggaagaggaaggagaggtctgcagacatcctggagctagatttgatgtggccatagcaaagctttcagcctcatcatgtttgtgatttccaaagtgtgtgtgtgtgtgtgtgtgtgtgtgtgcacgtgcatgtgtgcacaagaggaggagagggctccagccctgagcgctggctgccttgggctggttaatggagacaggtagctgcatgtggatatccaagaatgcttctcttgcatacctgtgtgaacgtgtggacccaggaccagctgtggggctgcccaggaatgtagacacccatgggggaacagtgggggtctgtgtgtcaccaaatgcctggacttgggctgtagtgtgtgtgccccatggagcccgtgtccgagcccaggaaggagtgcttccgtcaccacacatgtgtttgtatgatactttacatgtttactgccataaaaaggccacaaaccagggttataagctgaaaacaacacttgtttcctgagtacctactatgtgctgggacctgtgccagactctggagacacagagagaagtgaaactcaggccagcccttcaggagcccacagggcagagggaaggtggcagagcaacaaatcatttatggcacaggctgtaggtcccaagggctgctcttcatgtccttcctcagggatcctataatatcacaattgcagggatgatctgttttcactgccgtctccccctccaggctataagccccttggggatggacacttaggaggtacacgatgctctgtaaggatgtataatgcaaaggtgtctgtgagtcaggctgtgcctgggcagttctgagccagccatggccaatcatgagccatagccagtactgacagtaccgctgggctagggctgggctcaattcctgcctccactacagctggcccacctacacctgctacgtcagctctcccagcctctgttttttcatctgtgcaatggagttatgattgtcccagcctcccagagggcttgaggctttagtgagattgtgagccaggcccggcacatgtgtgcacgtgcacacacacacacacacagagcttggtacacaggagctgctgtggaattattattattagcaagaaggagctattatctgggcagttctatgcagccttattggccaaaaagacagaagcagaactctgaagcctccatgggcaagctggaaggcaccccagcagacagaaacctggtacagttctaacatcaggaggagggaacccaagggtggggccacgccattggctggcaaggattcaagagcatccatctaaatattttcctcgtgtttctcactctccagccactgatgtctccatcgagtcttgggtgcttcttccagtctttgattcataggcttacccatcagacatcaacatgtaactttcatgaaattttgaaaaggtgtcactttgggagaatgtgccctgccttctccatgcacaagcatgcttatgtgtgcttaggggcatgagaacaggaggagcagctgggcagcctgagctgaacccactccatcctcacctgcctagggggtgtggctggggcctggtggggtctgtctgccaccccagtccatggctcttccttctctctgactcacactggtccagctcaggcccctcatcctctagcttctgtgatcgtggttcaaaatcttaccagtgatatgctggagctgggtccagctggcctgcagggctagctgtgcacatctcttcctaactccagtgatcagaaacgatgccacattggtggcatgaagtcagccatgatgggaatatttaaggcacagagatcaacagatgatacaaatcagaccaccatcaaccctccttgagaaccagttgtaaacaccatcacaccccagtcctgcctgcaggtataacgatcactgatattaggtgccggcacctgctaggcatttaatatctttttttttttgttttgagatggagtcccattctattgcccaggccagagtgcaatggcgtgatttcggctcactgcaacctccacctcccaggttcaagcgattctcttgtctcagcctcctgagtagctgggattacaggcatgcactgccacacccggctaatgtctttgtatttttaggagagacagggttttgccatgttggccaggctggtctcgaattcctgacctcaggtgatcctctcacctcggcctcccaaagtgctgggattacaggcatgagccaacgtgcctggccagcatttaacatcttacctgcacaaaaatcctgttagatatttctcatcatccatatttcatatggggctcataacttacatgatttgactccaggtctctgcacattacattgggccatgtggcctcaataagtagaaccatgggatttgatagggctggcagagctgttaggaatcatcagatcatgtaatcactgcgctcatttgacagagaaactgagctcaaagaggctcaaagaggtgggggcttcctctgttaatgccacctaacacggtagccaccatcttcccaacacctccctcaacacctctctcagccccctaccatgctggtgtccactgaaaagccaaggtcgcagtcacttgatgttccctatgcatggctgattttttggaaactttacatgcagatcttgacattcattgcaagttatattttgttttgcttgatttgaccccgtgttcgagactctcaaaaacattttaaatctcacttgggtcattggttgtatgtctcctttctagacaggtaccacgcgccgctttgatctctgcaccttcgcagcagaaattggggttaaactttaaaaaataataagcaaaacagaactttggggcccaacacttgaagttcccaccctatctaccagagattctggcatctacacaccttggaaagtgggtccctcctcccgcagggctctgtctgccccactgtccactttggatttctgcgctggggaacatcagcagcattttgtcaaaagcccacggaggcccacgctgcgcgcctcgccggtaacagtcactctcccgtttaaaaacagagcgccctttcctctctcccctctgcccaagactctttgcctggcaacagggtcccctgagccattggacatgcatttcccccgcttccagagagcggttctgcaccaggacccggccctgccctgagtctgcgggctgcggcgaagagaccgcacttgcccggcaggagggcggacaatgacccgggttttccaccgactccagatgcgtccctcctcctacccctccaccttctctacctcggagaagccattgcgcttgcctccgccccatcccggagaggcagaatctcctccgtccccgcctcgtaccctcctccccgcctctccaggcccggggggcttcacgttcagccaccgcgaccccgggcgggcgcggcgccaggtgagcgctcacctggggccggagggcggggcaatgggggaggggcgggggcggtccaggggcggctgccccacccgcgacggggcggggcgagggcggtggggccaatggggcggggggctcgccgcccggggctggggagcctcccaatctcctcctttcccagcgccgcctgccccgccccacccgggtttaaagtcccgcgggcgggtggtggcggagctgcgagcttgagcggcgcgaggagatgctagagggcgcagcgccgccagcaccatgcgccccccgcccgcgctggccctggccgggctctgcctgctggcgctgcccgccgccgccgcctcctacttcgggtcagtgcccgccgcgccccccgcccgctccccggcctgcctgtctctccctcctgcgctacagctgggccaatttttccctcccgctgtccttggccccgccgaggtctcgaactcagaccctagcccggcgcgacccaacccacttcgcagtcggagttcgcgccctgagttcggtctccagcttccccggctccgaatccatcgccctgttcagtgtccgagtctctggtcgccccccagccgccgctctcctcatcccgccgggtctcggactctgcgcacgcctcggaccctggccccgtccgccccggccccgcccgttcaggcgtcagtcccgctctctgatgccctctcgggatcctcacgccggtgccctgtctgccgccatcctggcctccggcgagccgtccttgcctcggactccttccccaccctccgccttcgccctgcggagcggagaccgagagggctgggtggatgggtgggacgggctgttcccggtctcggggcagaggatcgtgcgcgtccagggagaatgggggaaacctcggacggtgagagcgccagctggagacgcaggaaggaaccgtgcgctggggaaatgcgaccacatctcagacctggcatggggtgatttctcaggagaacactggaaagagtgagagggcccagtgtgtgtgtgtgtgtgtgtgtgtgtgtgtgtgtgtgtgtgtgtgtgtgtgtacatggttggaaaaggaggatcacagtggggggtgacacctgggggacagtggggtaggtgacactggggagagagccggacaggaactatgtggggaatgtttggagcaaaagttatagggcaattgtttccagtcccttcttctctgaccctgaattgcagggatttggtgagggatgggggcgggtatcatgggtaagaaggcaccttcccaccatccacccaaagccaactccaatatgtacagcctgttactttaagccttgcctccttttaaaatcttcaccccaaatcaataggaggcttacagtctgagtatatacagcaaaggcaagaaaacaccaagcaagtgacctgctagaggctgctttgaagaagtagccagggagaggtatgtaaaggtctgagaagttctgcacaggttggagtaagggctgtgggctaatttccaggtcatgacccctggtggaaacatgtctgggctgtggaggagggtatcatcccagaccctagctctgggcttagcttgctaatgatatgggaagaccactcagtctctgggcctcactttctccttttgtacaaagaaggggttgaacttgatatgactgatccttttgcgatccaccccaacagcagtgcacaacttgtttgtttccgaagatttcaggcttgaaggaatggttgttccctcggcaggcaggatgtcatcatcactagggcacagactctggggtcagtcttgccacttgctaggtgtgctcttggccaagtcacttaacttaacctctctgtctctcagtctctcaatctgtaaaatgaagattatactgcctattttataagaagattgagctagtacatgtaaagcacttaggacagtgtctagcatgcagtaagtgctcaactaatgctagtgacttttttttttttttttttttttttttaagacggagtctccctctgtcacccaggctggagtgcagtgatgtgatcttgggtcactgcaacctccatctcatgggttcaagcgattctcctgcctcagcctcctgaatagctgggactataggcgcgtgccaccatgcccagctaatttttgtatttttagtagagacagtgtttcaccatgttggccaggctggtctcgaactcctgatctcaatctgcccaactcagcctcccaaagtgctgggattacaggcatgagccaccaggcctggctagtttttttcattaaggaaaccagttatagaatcttgatgtcctggccctaacagttttctgagctggaatggaaagggatgggacaaatggtacctatatcctcttacacactggctcatttccacgattcatttgtttgcttggtttttatggttagagatggggcaagagtcaggtgagatgagaggagaggggttccaggaggaccaccctagctgctgtattggaagggaaaggtgttctcagcagtgcatggggttagaattttgagggaactgagcatggagcagccttgaaaatgacatgtgagatggtcaaataggcctgggttagggctgagagggatgagtatcggagccacctcttccaggtcaggagcccagctggaaagagctgacaaaagacacaaaagccaccaccaccccaatctggggagcaggacagatgctcagagaatcagctaaaactggggcctcatgatgttaagtgtttggtctcagggaacagacaggattcagcctgagctctcagttaagaaaccctctggtgactcagaccaggtttcccagcttcccatctgcattcgctgtctgggaggaatctggtatcagtcatctacactgtagtgggaaagtgaggcaaagcgcttcttcctccgcagtcatttgcatttgattataacacaaagtgctttggcatcctgataagagaatatgcaaacatcaggagggcaggtgaggccgatcttcttgggctctttgaaatcatagaatcgtagacttcagagttggaagtgaccccagaaggatctctggtccaaaactcactgcttcaagcaggatgtattattatcccaatttttcagatgaggcaacccccaaaccccaaaccacagtgagccagctgttggttctgctgcttttgagtgagcctagagcctaattctgttaatggtgataaaaaaaaacataactagtattgcagtttacaaatctcttttttctttttttgagatggagtcttgctgtgtcacccaggctgggtgcagtgtcatgatctcggctcactgcaaccgccacctcctgggctcaagcaattttcctgcctcagctttccgagagctaggattactggtgccccccatcacaccccactaatttttgtatttttaatagagatggggtttcaccatgttgggcaggctggtcttgaactcctgacctcaggtgatccacttgcctgggcctcctaaagtgctgggattacaggcatgagctaccatgcccagcccatcactttctcatacagccatctctctcatctgatcctcagagccatttctccagagccatgtaggatgggtgtaaatagttcccacaaggaatctgaaggtcagaaaggttcagtcagtcacccagtgttacacagtgaatcggtgggggaggttgaatagaaaccctgcttccagtctgggcccttcaacctacaggaacagcctccagtgctaagacagtatgattcccccagggcagcagtggctgcagagaggccgaagggggtgagggtggagggagcctcccttccctgcttaattgactcttttagactctcttggctgtagtgagatggataaggccgcacattcttttctgtcctcagtagtgagacgggttgcactgacccctgctagactgtcagtttggctcacagaacagcatgatggcagtgggacaggaggcggaccagaggtgagggtccaagctagtcctggctctgggacactctctgtgttgtccctgatcaagtcactcatctccaaggtcagtagcacctggaggtgctaaggttccctaatgctaacagggctggtcctggctctggaagtctaggattgctgaagagtttttattttggctttgaatgcctaggaattccacaaatgttaacttctgtgatgttgtataaatgaaaatgcactgcattatgtgatgagctgggcacaagacaggcccagttacccaatccagtctatttatttatttatttagagacggagtctcgctctgtcacccaggctagagtgcaatggtgtgatctcggctcattgcaacctccacctcccaagttcaacagattctcctgcctcagcttccccagtagctgagattgcaggcatgtgccaccatgcctggctaatttttgtatttttagtagagaccatgttgatcaggctggtctggaactcctgacctcaaatgatccacccacctcagcctcccaaactgctgggcttataggtgtgtgccaccatgcccggcccccagtccagtctgtaagttatccgagtggctttgtaactagaaatagtttctgtggatgcaagtttttaaatcataattaactttggtgatgtttcttcagtgtgtgacctctgcactggttgagtttctttcctctctagggatagtacagagaagtttatgaaagcccaagacagtgaatcccagctttgcctgttgctaactgtgtgactttagacaaatgtcttaaccttgctgagctttgggttatgagaatacctatctgagaggtgagggtgaggcttaattgaaacaatgaatgaaagggctggatagggtgtctggcacatatgtgctaagtgctcagtccaggctcactctcagtggatgctggggttctaaacatcatcccaggtggtggaagtgtcattactataattccattggagaaacaaaacataatctttattttccccccaaatcgttgttatatacaatgaaatgcatgctttttctttcttttttttttttttgagatggagtctcactatgtcgcccaggctggaatgcagtggtgcaatctcggctcactgcagcctccgcctcccggttcaagtgattctcctgcctcagcctctcaagtagatgggatgacaagtgtgcgccaccatgcccagctaatttttgtatttttagtgaagacacggtttcaccatgttggccaagcaggtctcaaactcctgacctcaggtgatccacccacctcagcctcccaaagtgctagaattatgggcgtgcaccaccacggccagccaatgcatgcattttaaattgcacagtttgggttttaacaaattatacacctgtgtaacacatttgtggtgactccaatgactacatagaacatttctaccatcctaaaggatcctttgttcctctttgcaatcaaccctctcccaccagcccatggctactccacttctccgctttcagtcactatgtgttagttttgcctattctggaagtttatatcatgaaattgtgagtatatagcctcttttgcttggattattttgctcagcataaagcttttgagattcatccatgtcgttgaatatagcaatagcgaattcctttttatggctgagtattcctttgtatggctataccacaaattatttatccattccccacttgatagacatttgggttattttggctgggcgtggtggctcatgcctgtaatcccagcactttgggaggccgagacgggcagatcacttgaggtctggagttcgagaccagcctggccaacatggtgaaaacccatctctactaaaattacaagaatcagctgggtgtgatggtggtggtgcatgcctctaatcccagctactcaggaggctgaggcaggagaatcacttgaacccaggaggcagaggttgcagtgagccaagactgtgccactgctctccagcctgggcaacagagcaagactctgtctcaaaaaaaaaaaaaaaaaaaaaagatatttgggttatttgcagttttggactattccaaataaagctggtataaacatccatgtacatctctttttgtgggtgtatgttttcatttctcttggataactgtctaggagtggattgttggatcagatggttgatatatgcataacttatagaattggcatttttcagagtggttttaccattttacacagtaatgtatgagagttccagttgctccatattctatggtcagctatcatcagttttaacttgtggctattttcgtaagtatgtagtagtatctcattgtggttttaatttgtatttccccattgatgaatggtgtgttgaacattttcccatgtgtatattggtcatttgaatatcatttcattgggttatttgtcttcttattgaattgtaagagttctttatgtattttgttgttgttgttgttgctgttgtttgagatggagtctcactctgtatcccaggctggagtacaatggcatgatcttggctaactgcaacctccacctcctggattcaagcaattcttgtggctcagcctcccaagtagctgggactacaggcatgcgccaccatgctcggctaatttttgtatttgtagtagagataaggtttcatcatgttggcctggctggtcttgaactcctgacctcatgtgatccacccacctcggcctcccaaagtgctgggattacaggcgtgagccacttggcctaagagttctttatatattttggatacaagtctttgtcacaagtactggtaatattttattcctgcccgtgacttgccgtttcattttcttattgatgtcttatgaagaacagatgtttttaattttgatgaagtccagtgtatcaaccttttcttgtatggtttgtgctttgttggtgttctacccaagaaatctctgcctacccaaaagttgcaaagatttcttcctacgttttctcctttttattttattttattttattttattttattttttggagaaatgatatctttcggtcctccaggctagagttgcttctgctgcttttgagtaagcctggagcctaattctgttggtggtgataaaaacataataactagtattgcagtttacaaatcactttctcatacagccccttctctcacctgatcctcagggccattcctccagaaccatgtaggatgggtgtaaatagttctcacaaggaaactaaatgtgttacacaatcacagctcactacagcctcgaccttctggactcaagtgatcctcctgccttagcctcctgagtagctggggccacaggcatgcgccatcacgcccagctaattttttatttttttgtagagatggggttttgctatgttgctcaggctggtctcaaactcctgggctcaagcaattctcctgcctcggcctctcaaactgctgggattattggcatgagccacagctagaaacttataattttagctttttttttttttttttgacagaatttcactcttgttacccaggctggagtgcagtggcatgatctcggctcactgcaacctccacctcccgggttcaagtgattcttctgactcagcctcctgagtagctggaagtacagatgcccgccactgtgcctagctaattttgtatttttagtggagatggggtttcaccatgttgggcaggctggtcttgaactcctgacctcaggtgatccacctgcctcggcctcccaaagtgctggcattacaggcgtgagccaccacacccagccaatcttagcttttacccttaagtctatggttcattttgagttaactagtgtgtacagcatggagtaaggggcaagcttattattttgcatatgaatgtccacgtgtttcagtgccatttgttgaaatgatgatgttttctccactgtcatctttgttgctcatcaattgattcaatatgtgtgggcctatttctggacactctactctgtttcatttatctatatgcctatccttatgccaatactatacagccttgattacagtagctttaaaaaaaatttttccccaataagccttttatattcctagattactatagctttatgttaagtcttgaaactaagtactataagttctctaactgtgcactattttttcgaaattgcatgggctattcagggtcattgtatttcggcatagattttagtagtatctcgtcaatatccacatgaaagcctcctaggattttgactgggattgcattgaatctatacatcagttcatggaagattgacgttctaacaatattgagtctgctgatttgcacacaggccatatctttctatttagagcttttgtaatttctctcagcagtgttttctagttttcagtgtgcaggcattgaaaatttaaaaaaagaaattcttccaatgtgctctatgtatttagatagtattgtttttatttttaataaaaacacatttttagaaattgaattggggcctgagaaaaacatagttggagggaaggaaaggtaaaagaaattttactgctttgggggtggtggactgaaagccaaacatcgctgataagaatcactgtgttttgggaaggaatttaggccagcttgtctctggctgagctgtaacccctgaggagctgggctccagagttgggctgagagtcatcctagcctcttcagtggatgatggtggactttctgtggctgaggacgggaaggaggagaggagggaagcggggccggcagactcccgggctggaatctcctaaggaagagaggtcctggtgcctttgggattatgtgctcaggtggaagttgggctcaggaggaggtgggccaggtgctgtgagggtgactcccatcctggcatcagcatgagcaggatcggacatggcccaaggccctgttatagtgtaaggggcactgggcttggggtcacacagatcagagttcaaatctccatctaccacttactgactgacccagggcaagtcagataaccattctgaccccagttttctcatctgtaaaatgggataatcttgatctcttaggcttgttgtaagagttaaatgaatgtatatataggtattcaaatgctatctctatataaggattccaagaaatctagtgatctgccttacagcgtcccacgtttagaagagtctttggtggtgacatctgttccttcttctctgtgcctgtatcccagccactgtacaattcagaacaaacccagccttttctgtgctcagcactttatgtgcattacttcacctcacattgtggcaacccaggaggtaggtgctgatataattctcatttattttaaaatttcactttttttttatttttagagagataggttcctgctctgtcacccagactagagtgcaatggcttgatcatagctcatggcagccttgaactcctgacctcaagcagtcctcctgcctctgccttctgagtagctgggattacaggcccaaggcatcatacctggccagttatcctcatttataggtgtgcgtgttggggggaaactgtcagaatccaagccaacctcttcatctctgccatatgttggcagtggaaccccaactggaggcctgtccccttagggcagctctgtccctctgagccccgaccctgtggcccaggccctgcacttggtgcatgtcctgggcatctgttgtcctgtgtgtctcaaactcttggctcattagctaatttttcaggtgctcaggtcttcaattcacttgtagtttcctttagtagagacctcggggccctgctgttggctgagtcccacagtctctagcagtgctccctggtctgcagtgaatatcttggtgggcagcgtcctctccctttcactggcccttcctttcccctggaatctccctctgtgccctgtcccattcactccttcatcttctgcctccatgggctctctggggcacatactacctcacctaggcctggccaactgggagccatggcctggcttctgtcaggataggaactggacacaaagcagagagcagagacttatccccatcggactccagaaatcagccacacccaccacctcatggcatgctggtagcagcagacatgagctgggggcatagggtggcctcttctacacccaagcccctcattggagagatgaaggctgaagaggagggtgaagagtcttagagccagaaagaccaactaccaagctctggtcagtcctggaaacttccaagaggctggttttagggcaagaccaaagggtttgtttttcctggtgttacaatccctttgaggccagatgctgtcagaattcaacatttctctttgaattttagaaaagtaggccgggtgcagtggctcatgcctgtaatcccagcactttgggaggctgaggcaggtggatcacctgaggtcaggagtttgagaacagcctggccaacatggtgaaaccccatctctactaaaaatacaaaaatagctgggcgtggtgacagccgcttgtaatcccagctacttgggaggctgaggcaagagaattgcttgaacctgggaggcggagtttgcagtgagccgagattgtgccattgcactgaagcctgggcaacaagagtgaaactccgtctcaaaaaaaaaaaaaaaagaaaaagaaaaagaaaagggaaagaaaagtaatataggaggtaggggaggcagaacaaataaacttaaaaaataaaaattaaaaaattaaaagtacagaaaggtaacgtatcgtatattccatggctaacagcacctctagcaagatctggggcagcacctgtaatcagactctattaattttgcaggtagacatctacaggttgggataaacaaagcccataatattctccctggtttgggtcagggcttgctaccgtatgagttcaccacaattgttaaaaaaacttgtagttttctgagtttcctggaatttggaattgtggataagggtttgtgaatctgtggcaaattctgagcccaagtcactgcgagaggttgtgcaagctgagttttttttgtttgttttgttttgtttttttgagacggagtcttgctctgtcgcccaggctggagtgcagtggcaggatcttagctcactacaacctctgcctcccaggttcaagggattctcctgcctcagcctcccgagtagctaggacaacaggcgtctaccaccacacctggctaattttttgtatctttagtagagatggggttttaccatgttggccaggctggtctcaaactcctgatctcaagtgatccgcccgcctcggcctcccagagtgctgggattacaagcgtgagccactgtgtaccaggcctaagctgagttttaaacaaagactcaggccagttgcttggctggtcctcgctgggtgtcaccaggctacccaagcacagatcttccccaggaactgaggttcagagggaacgggcctggctctcagaccccaaggtacagggccccacaggggctgaggaccatggcgggatggccccgagatctggcactggggagagcatacgccagcaatcagtcgtgggctagggagggcgtggcacaggcagcctcctccagagccacgccctcccaaagcccgcccagccccagcttgggaaggtttggcggtggggcgttaggtggtagcctctgcagccagagagcaagaccacagcgaagccagcagggtgggactgcagggaggctgagggacagccccgaactgcactccttgcgtggggttagacacctaaggggcataatatgcagccagcaggtgtctgtagagcatctgcttgggaggagcacgcatctggactgggaaagaatggatctcagggtatgaaaaaccatggcctctgccaaggagcttacaggatacagctttgaagaggaagaaaggagtgtctgccatgcggaactgatggtactatatatacaaaagtgggagaagacaaagaaagaggatggttagagggggatggggctggcaagtaaggagggcttcctggaggaggcaaacaaacatcacagcatactagagctgtctgggacctcggggtgatcaaatgttaaaaaaggacatggctataaaaggttccagggtatccatgagggcttttggactgggagaaggttacagcatgggggtcggaccgagttagacatggcagaggacaagggagagactagcctggctgaggggagggtcccctttctccagccctggctggctctggatttaggacagtcctagtggttctattcccaagggagccgctcacaactacatccatcccagggggtgtcctggactactctgggggtggatccttgatcaggcagggaggttcctgctgtccctacagctgggcgaagggtgtgggccatccgtggggcctgcaggagaacaagtggaatctgcagcatgggacatctctgcctagagcctgtgcaaacaatggcactgtcctcatcattgagggggtcacgcacaaggcattccccagaggcctggcccttccagggcccaagcccagcctgagcctgcctgtgcgtgggaagagggtgatcggagcccagggtgcattcaagaacctgtcaaggtagttagttggtcaatgcgtcatggttaaataacttggctgcagtcacccagccagagtcacccagtaccctggttgggtaggaacttgccaccaggagtgcggtttcagccatgatttgcctttccctgaacttcccacccactgcctccacatccccacaccaagctcccccaactccttctcttcacataccaggccctctcctttgaacttccctctatctagccaagtatgttctcaagcactggtattgtatcagactctcacactttagtatgaagaggtaggccacttctgtaagcctgattcctgactttttgctgaagagactgagtttcagaccagggaaagtagcctttaaacagagggtctttctctcccttcctgagggtccacccttgggccacccagggggtcagaggagtcctgaccaggtttccttccctcaaaacctagctgtcttgcatttccaccaccttagatgcttgctgtggtgatggctgatttggcttccctgatgtgctgggtctgcaagcagaaactgccaggcttggtggaagcaatcaagagacctgggccacagacccagccctgctaccaagccagtgggtcgccttggacgaccaatcttgcatgaatttgtggccaccggagacctgcacacttggcatgcccttgccctcctgcttccccgcacagcctccaggacaccttccaggagccagcagagcagaacttctgggccgggtgaccttaaagggtttctccagctctaacgtataatggtttgaatggtgtacatttggactcagcctaggaactggggtagatgtttacagtcacagactcatagaggtgatggatccttctttgcaggaatgactttggggaccctccgcagccactgtgacacctgatgcatacgtgccagggacaaaggcttcctctccttggcttcagcccgagcctgagtggagagggagagagacaggaggaagaagaaaaagcatttccttcacagatgttgaactagccacactctaaatgccggggattgttgagatgcaaagcatgcttgctgtgcgagctgctcactacccacttagcccctgagcacgtctccctgatgccatcccctgcaggcagcctggtctgcggctgtgagacaggaagtggggctgtgcttggagagacaaagcctacagctggacccggctctttcctctctgagtcagggatgggtgggggacgaggctgtggggtgggctccagcggggaagtgtggccagattcagtcctcagggtgggttcatggggatggagggtgagagctgggtagggaaggaaggctggatccaggagtaggggttggggagccagacaggaggaacgagtggttttgaggtctgtgggtggactgggcaaaaagctgatgcttagaaaagtcctttttggtgtgtgtgacagggtctcactctgtcacccaggctggagtgcggtggcgtgatcatggcccactgcagccttgacctcctgggctcaagcgatcctcctagcctgtagctggaaccacaggcacgtgccaccatgcccagctaattttttaatttttaattttgtagagacaacgtctcacttacgttgcccaggctggttttgaactcctaggctcaagtgattcacctgccttgacttcccaaagtgctggtactacaggtgcgcgccacaatgcctgaccaaaaaaatcctttatagttgtacttttgtttattgatactcagttaatagaggtataaatgaatgagcgagtaagtgaaaagagggggtggagagagttgggcataaaggtaggaaggttggaaatagtagcttccgaatttgcctggctgcaggacgtcatggaggaggtgcaaggtggcattgggtgctgtagaagagaaaggcacctggaaggtagaggggagggtgtgctcacagtaggggaaatctggggcctcccagtgtaacagcaggaggggagagaagcctggagttggtgttgagcagccaccctcaaaaaagggctgcccagagccatggtgccctctcttactgggccaggcactgcccctcactgaactccccgctactgggaagaggttgggagcggagagcacaggaggggctaggggtgtgtgagagtgtgtgtgtgagtgtgtatgtgcgtgagaatgtgtgtatgtgtgagagtgtgcatgagtgtatgtgcgagtataggtgtgtatgaatgtggatgtgtgtgtgagggagtgtgagtgtgtgtgtgtatttgtgtgtgtagggggatcagtgagggccaggagaggtagactgagacgtttgagatgaaagcacaaagggcgcactcaccatgcaaatggccttgcagcggaagcctgttatcaggagcatctgatggggtttttcagggtggaagccagcaccccgggcagcacaaggctttcccggttcccaggcagctgcctgtagttggcatggccctggcgtaatgcactactcctggaccctccagctaagagtccagacacactggcattacctggtgccctagaaaccacctgccttgtcctgtgccacccacccaccacatcctggggatagcctctgctgaaagcatcagaccctctcaagcagaaactaggatgggagtaggtggaagaacagggcttggggtcctcttaggtgatgagaaaagctctccaccaacctggtcttccccaaacagcctggagtgctccctgagagcttcctcttgcctcctcctcacccccaggcctcctacaggcaggatgggactggtcaagatcaagttctcacctgcatggtaccaggagttctgatctgggtccctaagcagctactggtgtttcctcaaggaggcaggccagtgcaaagctttctcttccttccccttcttggggccttgagagagtctggaggactcctgagtccaaccaacttccttccagactgtgagcttcttgagggcaggaccgtgtcccagcacagtacctggcacatggtagatgctcactaatgacaaatacttatctggagcttactgtgtgctcactgctctcagagcatagagaggtaaagcaccttgcctaaggtagcacaactaggaagaggtggaggtgggatttgaacccaggcagtctggctccagccatcccctctcatgagttaaggtgtatttgtttgatggaatgagctcagttggtgaggggacaaccctgaggtcacctcggagtgagtcagacctaggaccagactacctaggccagaacagccttggggcatgagatccttgggccccactctccaggcagggggtgggtgattactgaagggtgaggtccctggggtcctgctgacggtggacagagcagtctcctgggaggcttttgccaaaacctgggagagccatcttctgcttccttcaaggtcaccccagcggggcagctttagccacaattgtgggtggggtgtgtgttggagagtgtgaaaggaggtggggaaggaggttccaggaggatcagaagagatctgagggtgagagtgtgtgagatgaagccctgaggggcacccttgacttctcccactctagagaaagacaggctggtctgtcaagtggttgggggtgtcctggggtccaagccagaggtcatcgcatgtgtggaggtgggggctctggttttatgatgaacctgaccaccaaggaccatggggtgaaggtgcagagaacagaagggcacagactgggggcagcaaggggaggaggcggccgctgttcacctggggtcattgctttcttaatgggaaaagagaggctggaagttagcctggggagcctgagacagacaggaatagtggaggtagctgggccaaagcaggtgcagcctgatagagtggtggccccaggaggctcaggagcacctgagtcaggcagtagcccccagcccagaagagcaattagcaagttggcaaacaacccttcctctgccctttagttcagaaccctggttacttgtttaactgatctgatagcatctcattggccataaggcagcatcttcattaagacccccatatttggctgggcgtggtggctcatgcctgtaatcccagcactttgggaggccaaggtgggcggatcacatgaggtcaggagttcaagaccagcctagccaacatggcgaaaccccatctctactaaaaatacacaaaaaaaatagctgggcgtggtggcacgtgcccataatcccagctactcgggaggctgaggtaggagaattgcttgaacccgggaggcagaggttgcagtgagccgaaatctcagcactgcactccagcctgggtgatggagtgagactcgattaaaaaacaaaacaaaacaaaacaaaacaaaaacaccaaaataaacacatttttctgggttcataagactaaggaagcccacttgaatttctccagttgtccatcttacccccttggcactcagctaactgtgggtaattgagatttcacagagggacccagtgagtggtgtctgcagggctgggatgccaaacagtatgacttcttccaggggatgacgttgttcctgctgacctctgagcaggctgaagcctgccacacccagaattattctggggtctaggaagataccttcccagcagaagccatgggctgagcatgtgtcggataattcactgttgaggaaaatagatggtcattttctaaatatgatgtcatggtactatttcttcaaaggaaatacgatcccaaactgcaacacagaaaataaacagagggaaactgggtctttgaggcctcccaggctgtcttcatgggccctgtggggttcccgaggcagtgccagggagccttctttgagagcagccctgggcagaccagggcccggtgtggcctgaggcctctgtgcggttggctacctttcctggtcattaatcgctactaagtgtcattaccactaataaaattaaccgacttgatactggactctctgagccatcaatctcagggtccattagatgaaatttaaaaaacagatgcctctggggtggggcctgaggatttgcattccacagagctccaaggcaacactggccatgcagagctgggcaccgtttgagacccattgctccctccagggtctcttcccctgggcatcgcggacattgtggttggagtggagccgttctgggcactgcagagtgctgggcagcgtccctggtctccacccactccatgccagaagcaccaaaaacgaaaacaaaaatgaacaaaccaacaaaaaccagatgcctgttgaatgagtggaggggtttgctgggtctggctcccaagtgcagcctagggaattctggcactcttcacatgtcagaggtcataatcaaggatgatgcatttagttagacaaaccaactttgagccttcgctccacactacatgggagtcccagacaagaacacagcttgggcagggtgcagtggctcacgtctgtaattccagcactctgggaggctgaggcgggcaggtcacttgaagtcaggagttcgaaaccagcctggctaacatggtgaaaccccgtctctactaaaaatatgaaaattagccagggatggtggcgcacacctgtagtcccagctactcgggaggctgaggcaggagaattgcttgaacccgggaagtggaggttacagtgagctgagatcacaccactgcactctagcctggaccacatagcaagactgtctcaaaaaaaaaaatgttatatatcatgtcatatcatatgacatatactgtagctataatgatataataatcatagctattattcttaaaatggcatttgaggcaggtcttgaaggatatgcagcttcattggccaaaatttccatcactccctgcttgctctcccctctgtcaatcagttgctatcagggaggtccagtttctgaaacacaggaattgtgtgagcagaagtcgccactcacaccagccctcggtgtgagaaggaggacatttgagggcaaggtagctgcagcccccaagctgccctccacactggaagccagtcaaggcgtggcctcctcagctggagttgacatccagttcttctctggacctgccaagggtcaaactctgaggatttcctgccaggctgcagggaggggtttgggtgtagacctggtggactggaaaattacccatttgcccccagattaatgattaacgggtccctgccctcaccctgtctgggagaggagcccagggccaggctaggccaacgggagcccgatagcatctgtctctgctcggaggtttcggagatatgctccatgatgggttgactgcacctgatgggtgtggaatctacaggtgatttctgagggcacctggggcctggccaggccgcataccctctggtgaggcttccaacttctggggcatacagagagggcatggcctccagccagatgtcctggctaaggcaggtgactccaaagaggagagctgtgcccttggctcagaggaacatgggcttctctgaccactcctggcttgaccacaggacttaccttggccagtggcacatgagcaacagtggcaagtgccacatccaagcaggagctctaagagacattgcctgcttccacctttgcttttttttttttttttttttttttgagatagggtcttgctctgtttcccaggctggagtgcagtgatgcgatctcagctcactgcagcctccacctcccgagctcaagctatccttccacctcagcctcccaagtagctgggactacaggtgtgtgccaccatgcccacataatttttctatttttagtagagacagggttttgctgtcacacaggctgctctcaaactcctggactcaagcgatccacctgctcagcctcccaaagtgtggaattacaggtgtgagccactgtgcccagcccacctttgatcttttaccctggctatgaggccaggatatcccagaacagggttacttctcttgggctgggtcctggaatgatgtatattccacccacactgggggcaccaggatataggacagcaaacattttgaaccagcagagccatctcacagagagcttctgggaagagggaagacgaactctaattccaattcccaccctgctgctgatctgttgtatgaccagtccagtcactgccccctcgtaaatcctttgtttcctcatctggacaaaggggagactctgcttagctggagagtaaagcatcttgcaaaatgagggaagtttgggaagctccagctagcaggaaggtaggcctgcttgtcccaggcactgtggttagtccatttcatataatcctcccaccaaccctaggaggtagagaagatcactctgcccagtttccagaagggaaaaaaccaaggtgtcaagattgcatagctagaacatcagccttagaatttggtagcttggctccagaatcgatgaactttcaatctaggagaacaagaagtctgggattgatggcctgatgggaattcagctccttcaccttcatctaaccatccatcagtccttccttccttcccttctctttccttccatccccttctctccccaggcatctgtttgtaccaggcaccaggtggtcagatggttgaaggtctatctgggaattatggaaacatgttagattggtacaggattacttgggcagcagcataatgtaagggagagagggatgtcaggggaccttggctgggtgtccgctcaatgtccacatcccctctgcctgccccctctcaggaatgtggctctcttggccaggcagccaccaatactctgtgcattatttcccaaacttcccggatcacaaaagctgcctagggactgtggtaaatgtacagattcccaggcccaattccaaaccaatagacccagaattgcccagcatggatcctgggaaagcgtatttttaataagcaccccagatgatttttctaactgggccaatagggaaataggaaaatagggtggataagaagagcagagaccggaatctggaaaacaggtttaaggtcctgcagcaacctttgttacatgaaccttggtttcctaatctgtaaaatggggacgggacctccagcgggtcagcctgctgcccagaagggcagtaaatgaagcccctgaggaggccccttcccttcatttgcccctcaccaccatccccaaggctcacctgtctccctcctctcgctctctctagcctgaccgggcgggaagtcctgacgcccttcccaggattgggcactgcggcagccccggcacagggcggggcccacctgaagcagtgtgacctgctgaagctgtcccggcggcagaagcagctctgccggagggagcccggcctggctgagaccctgagggatgctgcgcacctcggcctgcttgagtgccagtttcagttccggcatgagcgctggaactgtagcctggagggcaggatgggcctgctcaagagaggtggggaggagggctaggggacggggagggctgggggaagaagccttcagggaggaggaggctgggagaggctgccctttcctttttcctggctcccgtgcccaggccacactgcccttcctgccctagcacggtcccaaatgagaagagtcacaagagttaatgaggggcagttgaaggccagctgtggcccagcctcaggtttgggggagcagaggagcaaggaagatccaagagaggaggagacacaagcctattcctggaggagctcacagataagatggggtcccccagttgtctccctctgcctcttcacacacacacacacacacacacacacacacacacacacacacacacgaaacaaggcacatgaagacgtgaggatgggcggcagctgattccaggcccgatgacacgagccaggcgatgcatttgttcactcctttatctgtccctttgtttgtcacatccatcgatccatcagtccctccttcccttccactcccattctacctccctccccactccacccacccactaagcatccatggaggcccatagtgagccaggcactgtgccagatcctggaggttcagagctgaaccagacccagctaccctcgggaagcatgcagtctggaagggagaacacaggtcaccatgtgactcccttgccaaggggaaagggcttttgacagggaaggatgagggaatgtggcttgaggacacagctccgggtgggtctccctgtcaattgccccttaaactctgactcaagttgccatttaaatggaacttctagcctgggcgcagtggcttgtgcctctaatcctagcactttgggaggccgaagcgggtggatcactttaggtcaggagttcaagaccagtctggccaatatgatgaaaccccgtctctactaaaaatacaaaaatttaaacactgcagttggccggttgccatggctcacacctgtaatcccagcactttgagaggccgaggtcaggagtttgtaaccagcgtggtcaaaatggtgaaaccccatctctactaaaaatacaaaaattagctggcatggtggcaggagcctgtaatcccagctacttgggaggctgaggcaggagaattgcttgaacccgggaggtggaggttgcagtgagccaagattgtgtcactgcactccagcctgggagacagaatgagactctgtctcaaaaaaaaaaaaaaaaaaatgcagtgatgctgtacagggcagccaggcccctcctaggccagctgctctccacggtctgcagccaagctaatggcctctctctgtgtctctctcgggacatcaccagcacccagatgcactggagggcaggcaggaagtagtgagctggtgggaggccaggtttgggccacacccagcagagaggagtgtcggtggttctggagtgggtgggatggtcagtctgaggcaagtcagccaggagactcaaggtcactgtatcattgggtctattccacagtgggtagcagagaatgacatttgagaaccatcatgtgtcataggaagcccatggggcttatctcaggggcctcagaaatgggcccatccaaatggtcatacaccgacctggagtcaaaatggcaggtttagccccaactgtgcctacgccaggtgtctgagtagcttctctttgcatctcagtgttcttctctgagaggtgaaggccgtagcccctggcctgctgccctctgggaatctgggaacatactccatagtgaatttgtaaattccatttatttatttatttataaattaaaaaaatttttttgagacaaggtctccctctgtcacccaggctggagtgcaatggcgcaatctcagctcactgcaacctccaccttccgggttcaagtgattctcctgcctcagcctcctgagtagctgggaatattggcatgtaccaccatgcccggctaatttttgtatttttagtagagacggggtttcaccatattggccagactggtcttgaactcctgacctcaaatgatccgcccgccttggcctcctaaagtgctgggattaggggcacgagccactgtgcccagcctggaagttccatttaaatggcaacttgcagtcagaatttaaggggcagttgacagggagacccacccggagctgtgtcctcaagccacattctcttgtcctgcccatcacagcgctgccaccaccgcctctggccctcagagggcggcaggcaacctctaagcttcctcctttcctctcttccccctttcctccctccctatgcccctgggtgcccgatccaggcttcaaagagacagctttcctgtacgcggtgtcctctgccgccctcacccacaccctggcccgggcctgcagcgctgggcgcatggagcgctgcacctgtgatgactctccggggctggagagccggcaggcctggcagtggggcgtgtgcggtgacaacctcaagtacagcaccaagtttctgagcaacttcctggggtccaagagaggaaacaaggacctgcgggcacgggcagacgcccacaatacccacgtgggcatcaaggtgagcatgtccctggctgcccgcagtgccttcccaccagggtacacagctggggagcatggcttgaaggaggccagcaccccactccccaaaatacatgaagagccgtgaacttcataaaggcaggatgaacttcacgtcttcaaccagcattcccttggcatctactctgggctgtgactgggtgccaggaacacagcggaagcatggaagggtcatgagtgtcattggtggaagcagtggtcaccagtgggagccaggcttaggactaggtctggtgaagcagggacatgtttggagaggggtctccattccaaggaccaggccttcctggaggtcctggaagcccaacattgtttgaaaacctccatctagagcaactgcccacttctccattttatgggtgggaagatggaagtggcccagagaagggaaggggctgaggttacacagtagtgggaggtctggagggtgaaaagtatcttggtctattgaggggaggaggctgggagacaccagtgctctagctgtttatgagattaagttctgagttgtcatcactgagttgtgaaccggggctgctgtgttcaatcattgagttggtgtgaaccggggctgctgtgttcagtcactgagttggtgtgaaccggggctgctgtgttcagtcactcagttggtgtgaactgggactgctgtgttcagtcgcgtaagttgtctattccacaagaactccaggccaaggggaggagctggggctgagaccctgggtctctttcccattctcctgcctctgccctgctggggttggtgctctgggggcaggctctggctgctgggcccaggcctctgaccacgcctctgttctgcctcccccacaggctgtgaagagtggcctcaggaccacgtgtaagtgccatggcgtatcaggctcctgtgccgtgcgcacctgctggaagcagctctccccgttccgtgagacgggccaggtgctgaaactgcgctatgactcggctgtcaaggtgtccagtgccaccaatgaggccttgggccgcctagagctgtgggcccctgccaggcagggcagcctcaccaaaggcctggccccaaggtctggggacctggtgtacatggaggactcacccagcttctgccggcccagcaagtactcacctggcacagcaggtagggtgtgctcccgggaggccagctgcagcagcctgtgctgcgggcggggctatgacacccagagccgcctggtggccttctcctgccactgccaggtgcagtggtgctgctacgtggagtgccagcaatgtgtgcaggaggagcttgtgtacacctgcaagcactaggcctactgcccagcaagccagtctggcactgccaggacctcctgtggcacccttcaagctgcccagccggccctctgggcagactgtcatcacatgcatgcataaaccggcatgtgtgccaatgcacacgagtgtgccactcaccaccattccttggccagccttttgcctccctcgatactcaacaaagagaagcaaagcctcctcccttaacccaagcatccccaaccttgttgaggacttggagaggagggcagagtgagaaagacatggagggaaataagggagaccaagagcacagcaggactgaaattttggacgggagagaggggctattccatcttgcttcctgggatgaatggcttggagccagcatgttcttgggaggtgaactgctgggctaggaatgccaaggcaggcagtgccagctggaagtgaaggcgggagcctggctgagatgggtcaatcgggtcctgtggccctgctcaggtgcagtgggctccaggtgtcacacacctccaccactcccctggttttgctgtgccagagatggggagaaagcacaggtggtagaagccatccgttcagagaaaggagagctttctgtgcttgagtggacccgagtgagatctgtgccctggagccctgtgtccttgatttggcttttcaaatatgcctccgctgaggcctcattcttgtctcgagagctgggttatgcacactcacccagccgtgctcaaaactaccaccagtgcaggtaagacaggtgggagaactagccaccaaggcgggactcagtgcacctgaggttgaacagggagacaacggcccctccctgtgttccctgctggccaaaggaatcttcactcccagcgcagaggaggagggcaacagcttcctggtgcctggcagtgacgtggcgagctcagtttctcagctggctcttgagtgagctttggtgacttcctgtggctggggcctgcctggtctgtgacacccccataccagctgagttcacaatactgaagaacagctggctcacgagctatgacttgaagttacatttctattcttgtggctgctcatctagttaaggcttttgccctggctggggttataggtgcttgagtccttgctaagcctggctcctgggtagcctccttcagttcctaatggcctctcacttggccctcactttggctcttacttgaggaggagacgtgactttgataatttcctcagatcctgtggacattttcagcagcacctgccaaggccctctgtgaaaggaggagagactggtacctccacacaggcacacatggatgcacagcccctggaccaggctgggggttcctgttgcacatgcctctcttgttcaggatgaagaccttgcaggggtccccttgctggaggcattgtacttccccagagtggggcccgatgccacccaggaggaagtgacttctttcgggaagcccttggccactttgctggccctgccacgcccatctgtcagcttcctttctccctaaacctagagttgctgacccttcaccaacacaggaaatttcagaatcagctgaatgctcagaaacctcgcctgtgccagctccaggacaaaggcccgctgactgtgccctggccaactccctgagacctccaagggcgaggaggagctgcccagtctccagtggatcagggcagtctgctggatgctggaaggatttttgactgcagaggcccggctgagaagccaaactgacctgagcccctctcgttaaaatgacattgctgacccaagcacctggcccacaccttggcagcaggagaaaaatggggagagggctggttttctcctttcttccacttccccacagcatggagattttctctgccttcccaatccatcttgctcctccgagaccccaactctgcctccacccaggctcagtgctgggcgtaaggcagcagggacctcactggcagagcagggggcctgggagcaacgtggaggccagagcaccctgatccaccaacatgccacctgcattctgacttcatggctggcagtgccagggtcgtgggagggcaaagggcaggctctaaggcatctaggcagtggctggctgctaacatggacaccccaagtcaatggcacagtgcaggttctgagggctccttggcttgtggggtcttctctgtctgtctctctccctctcttcttccttgctctcatccctttcttttccagttacccctgaagacccacctcggccctcttggggcccctggggactagagtgaccactgacccctcattctacagctttaagggaaatgctcacagggtatttttgtctacctcaaatatatagtttttagagcaaaggagaataatttatatagctaagatatatgagaaagtatttatattatttatatagttgctatatttcacagacagcacaggtggggtttgtgtattttcccggaaaccctctgtctggggagatacagcctgacctgaccgggtcccccactgagcaggaggccgggtcgctgggaaggaggacaaacctgtattccatgactgggtctgtctcggagctggtaagcacatgtccgctctgtgatgagccctggtgggctccatccagaccctccttgtgatgtttttgtagattttctgcccttctgggtccaggcccccttcttctgctctggcaaaagtgtcttactcataatgataatgacaacgagaattcccacacctggcatttgtaaagcactttgctatttagaaacaaaaacttttacccctttcatctcacttgatttctccgttatctctgtgaggtaggtggggccacattactgtggccattttatagatgaggtccagagatggagagctgtgctcaaagtcacacctaagagacttgttcaatgaatatttactgaacatctccatagaccaggcactacgggctgacctgctctgagcccaggagccccaaagcctggataccactgtgagcccaagaactcagggaagcagttccttcccaggctgtgatcccagccttttggatctggatggcatgttggcacttcccccaagtggagtcccatgtctcaggggctttggctgcctgagaaggctggagagaccaggaacccatggaggccactccaaggggtccttctgcccacactgcccaagaagcttgggctacaccactgggcccctcccaacctacagatgaattttgattgctctcatttgtgttttgcttgtaaaaatgaattgttttccactggatttctggctgcttttgcaaaagtcagctgcgctggcagactgggcctgcatgtcctcctgcaggcagctagagtgagggagtctaatggacaggatgccccaagtgcccccgttgctcatggatgcccctgcctgcctctcatgagcacatagtcctgtcccctggtctagataagcccagctttcctggtacccttcatcacctggcagacagacagccccatgccaaccctggacattacttgcttttgaacctttcctttctcaacaaccatgaacttcaaatgctttctgtctcaggacactttagaataacaatggaagccatcacttattgagcaccccttatgtccatttattcaaccaatgattatttagggatctcttattgagcaccaggcagcatcctgggtgcttggtgcagcaaggaacaggaccaagtctctgcctcatggggctgacatcctagtgggtgagaaagacaataaaccaataaatgacatgccagttatttgcatttactttgtctcaatttattgcaataactttgcacattggacatggtccccgtaatggataaggaaatggaggttgtgagatgagaagcctcctcattgcaactggcaggcagtggggccaggattggaacacagatctcctggcctccaaagtatgggatttttttcctctgtacactggtataggtcgggcagggatggatcgccccattttattgattctgggtaaactaaggcctagaggaaggaaataatccatcctggattacacaccaattcagacaggccagagcctgcatccttcctggagttgataagcatttctggagccctcatgctatggcaagcagcatggctcagggtggggcgggatgaagccaaccaggggccttcagggacctacagtctaataggagaaatgagaagcacagccatgcagtggtttgggtcatttacacacgaatcctgtgtcccttttctggccacagttccttcccaacatgctttgggaggcctcgcccaccaggatcctcctgggggtctgatgggagaggaggcctctttctgagccaagcacagcagagagtgcctgtctcctggctcaggcctgccctgccccagttcttcagccctgctggggtccacattgccttaactgggctccccagggcgggaggcagaggtgggcccacagtccagccctgcaggggcctacatttccaccagcatccccgtcctaacatgctccttctacccagtgttcctgggcctggagaccagctggctctgagtaatgacagacacgtccacatgcagcagcaggctccagtttatcaagggatttctcatctattttctctcttgaacctcacaaggtggacacccttcttctttttttacagataggggaattgagacacaaaatggttaagtgacttaccaaaggctatatcgctagcaagcggatccaggccttttgcctccaaaccccatattctctctaccatacaccatcctcacctcctcctgccctcatctgagccttactttgttcctgctcataatctagttcccaaacaggcccgcagacccctccacctccagctgctcaatgccaccatcttccaggaggaccggggcttgttgagacagtcactaggtgggtaccctacccgcaatatccctcctcctttaaaaacagccacatgtgctttctgtctttgcatttgcaatatctatcttgttgaatcacttgtgagacctttgcagacaccaagacacttacatactttatcatgtatctcctaaggacaagaacattctccaacagaaccacaaggccatcaccacatctaagagatgtaacattgacaaaaattatctactacatagtccatattcagacttccccaattgtccctcaaaatgtcctttataacattattttctggccaggcacaggttcacacccataatcccagcgattggagaggccgaggcaggaagatcgcttgagcccaggagttcgaggatatagtgagctgtgattgcaccactgccttccagcctgagcgacagagtgagaccctgtctctaaaaaattaaaattaaaaaatttttaaaacatgttttcctggcccaggatccactcaagaattaggcattgcacgttgttttcatgtctctccagctccctgtaatctagaacagtccccctctttctttgctttcataacagtgatagtttgaagagtccaggctgcatgtctcgtggaatacctctcaactgagatttgcctgatcgtttccttgtacttggattcaggttaaacattttggcaataagctgcttgggtgatgtgtatcctattctgtgcatgctgtaaggagccacaggatgttttgctcttgttgcccaggctggagtgcagtggtgcgatctcggctcacagcaacctccacctcctaggttcaagcgattctcctgcctcagcctctagagtagctgggattacaggctcacccatgatggggatggggacattctggagggagaggcactggcgggaagcatcctatgcctgcccccacccttcccatttctttccgattcttgacttcgctccatctctcacctggagttccttcttgcaaccgatcatgcagcaaacacggattggtggcctatggtgcacgaggcacgtgacagggtcctagatgccatggtaatgagactaggtccagccttcagggaggtcccagacaaggggagagacaagcaaagagatggctggcatgcacggtgtccagcactccaataggtggctctgtgcaggctccaccccacacaggcattcctgtgcaggccatttcctcatactcccctctgggcaaccccaggggtccatacaaccatgatccccatttttttttttgagacagagtctccctctgtctcccaggctggagtgcagtggcatgatctctgctcactgcaagctccgcctcccaggttcatgccattctcctgcctcagcctcccgagtagctgggactccaggtgcccgccaccacgcccggctaattttgtttttgtatttttagtagagacggggtttcaccacgttagccaggatggtcttgatctcctgacctcgtgatccgcccacctcagcctcccaaagtgctgggattacaggcgtgagctactgcgcccggcctttttttttttttcctttgtgagatggagtctcgcttttgtcacccaggctggagtgcaatggcgcaatcttggctcactacaacctccgcctcccgggttcaagtgagtctcctgcctcagcctatagagtagctgggattacaggcgcctaccccacgcccggccttatttttgtatttttagtagagacggggtttcaccatgttggccaggctggtcttgaactcctgacctcaggtgatccacccatcttggccttccaaagtgctgggattacaggcgtgagccactgtgcctggcctatgatccccattttatagatgaggaaactaaagctcagagaggttcccttgctacacaataagtagcagggctggaaatgaaacagcttcttcactgcctcttcccggggagtgctgggcacggcctggggacagagagacggggtatgagggagttgcaaggattcagggcgactggtggcatcttccagtcctgccacttggtcctccttgtcttctcctctctctctttctccccaccctgcataccgcaaagaggaggttaatgcctctcacgcgtcttatccccccactcccatccctcctcaagtccccaggggctgtggggcccatattcctccctggctctcttgggcccattagtgtgtttacgctggagccgtctcaggggagctgagcccctacccctgccccaccgtcctcccgccatggagagtgggcagtggagtggtggaggccgggcagaggcacgggagaacctgacccagcgtccgaattcctgcccccacgtctcaacaagtccagggtggccagaagcctggagagcaacggtagccccccgggacccccacctcttcccacacagccccaccagagcctgacaggctctaatctcagctgtcttcatgcagccagccctccgagcccggggtcacctgacgctgacacattttaattcagaagctgatttctgcttgttggcaacatgtcatttctgaaattgctttctctgcccagaggcgggagatgtcagagctgcgcaggtgttgcagtggtgccgcccccgccccacacccagccccctctccaagttcaggaaggattaaggggcgtgagggggcacacaggagatcctcaagctctgcttctcatgtttccccaagtgctgggggccagggatgggggactcctggaatggcctctgctttcctttccagcctgatgacagaggcccagggtttggtaaatgaagttgctgctctgccagtgctgacaacagccacagtagttgttttgcgcaggcttcatacaggtaccaagtgctctgcagagtgcctctcgtgtgcattgttgtatttgaatcttatgacaacgctccaagttggtgtcatccctcctttgcagctgagaaaaccggggctcagaggggttagaccacttgcctgaggtcacacagcaagtatgaggcggggccagctttcagacccagtgaaggcgacagctggactgggattgggaggtctgggaagggagaggccgtggagctggggaggactatggcctggcttctcctatatttgcttcctgacttggttcaaatatctccagtgaaatttgtgaactcccccaacttccccactcctgcaacccatcaaatagttatttgctccctcttttatatttccttagcttttttttttagacgaagtcttgttcttgttgcgcaggttggagtgcagtggcaagatctcagctcatcacaacctccacctcccggattcaagcgattctcccgtctcagctgcctgagtaactgggattacaggcatgcaccaccacgcctgactaattttgtatttttggctaattttgtatttttagtagagatgaggtttctccatgttggtcaggctggtctcgaactcccgacctcaggtgatccacccgcctcggcctcccaaagtgctgggattaccggtgtgagccactgcgcctggccagcatttttttttttgagacagagtctcgctctgtcacccaggctggagtgcactggcatgatctctgctcactgcaacctccacctcccaggttcaagtgactctcttggctcagcctcccaagtagctgggactacaggcgtgcaccaccacgctcagctaatttttgtattttcagtagagatggacttttatcatgttggccaggctggtctcgaactcctggtctcaagtgatctgccagcctcagtctcccagggtgctgggattacaggtatgagccactgtgcccggccgccttagcattttgtgtatgttttgagtgacagccatctgtcaatattggcatcttttgttttattggatgaatgaatgaacaaatgaatttataaatcttgttctccatactgtttacccatcctcatttccctcacttggcagtgtcttgccatagcaggcttcctggtgtagctggcaccacatccctccctgacacacggcctccttattgcccctgctacttgcctttttctctcctccctttccttcccttcattccccctggcttccccttcccaactctcagaatccctggctgcctcaaccacaagaacaaagctgtgcagaagcctgaacctggagcttctgcaagatgaggtggggaatgagctaacccagctggaaagcagcctgctgatccctgggagagacggcgcttgggccaacccaccctccccaaggtggtcccctgcctcagctccacccgcttccccagatgaacttctttctctccctccagcgcttcagaggatgcacagctgtgtgtacttgaccctgagcctgggctagtgctggggacatagccagtctggctgatacccatatcagtacagaaagctgtcctcacccacttcatgcactagttgcattggtatgaagcattagctttataactatcccatttactgcaggcataaacctatatcaattggtggggatggaggttaaatgagagaagacatcaaagatgcatagaactattgggcccctttcaattaataaataaaatttgtaggaggccattagtttgtactgtgctcctgtaatggacccaacagaccaaacaaatatggagtcactcatgctaaatgcaattaacttgggagtatactcctaagttgcaaaaagtggtaacaaatagctgagttttggggcagttacagcagctgagcatctgtcaatgtaggtggccaggtgattcaattaaggatgctgtaaccaattaagctgtatctacacctcacttctgttttctatctacaaatactgcgtgatcatgttgctggttggagttctttgaataagctgtggttcggagggatgcccaattctagaatcatgaataaaagcctattaagatctttaaacaaaatttattgtcattttgtcttttgacattttacagatgggcaaagtgaggccaggtgagcaacagcatctgttttttttgtttgtttgtttgttttttgagactgagtctcactctgtcacccaggctggagtgcagtggtgcgatatcagctcactgcaaactccacctcctaggttcaagcaattctcctgcctcagcctcccgagtagctgggattacaggcgtgcaccactatacctggctaatttttgtgtttttagtagagacggggtttcaccatgttgcccaagctggtctcgaactcctgggctcaagcaatccacctgccttggcctcccaaagtgctgggattacaggcatgagccactgtgcccggccagcaagaacatccttaacacaaagttggagtcatggtaaaatgaggtcaggattgggcaggcactaacaggactttggaagtatagcattgctctatctcctgataattaatgagggatactgtttatgttcccatttaaaaattaagcctaaaaaattgaaattgggatccatttcacagaggatggtcaaatgtccaagaagaagggacaggtggtcattaaaattcagataaacagagttcccagtgagcactgtcttgggagtagaactaagcaagcaaagtcacctttcttctctgagcctcattcattaaaaaaaaaaaatctctatatagatatctttctatagcaatctctcagagagggccaggcgtggtggctcaagcctgtaatcccagcattttggaaggctgaggtgggtggatcatctgaggtcaggagtttgagaccagcttggccaacatggtgaaaccccatctctactaaatacaagaaattagccgggcatggtggcatatgcctgtaacaccagacacttgggaggctgaggcaggagaatcgcttgaacccaggaggtgaaggtttcagtgagccaagatcactccactgcactccagcctgggcgacatagcgagactccctgtccaaaagaaagaaagaaagaaagaaagaaatctctgagagagatagataacacatgtagcactcctactatgtgccaaacactgtgctgggccccagggatgaagcaattagtgagacaggcggagtccctgctcttaaaacacagaagacagataaacaagtcatcactattcaatgtgatgaaactgacaaccctactcaccctgggcagccaaactcagtggctgggagctagagatagggagagcagggagactttttactccatttcttgttgcttttgaattctgaaccatgtgaatgtattcctgatccaaaataaataaaaataaaatgtgatgagttttcacaagcgggagtgtgcttatgggaacatcagcagggagaagggataccgacctggcctagaggatgtcagagaaagcttcccagagaagtgagagcccagctacagcctgaagcttagggaggtgtgggtcaggtggggagttggagggagagggatgcaggtgtcaatggaagtttatggtgctgggtgataaacaccaacgttgcagggtcactgggaggattaaaagtgtccccagaaagtgcctggcacacaggatgtgcttactgtatggtagctattattattcctcaattatggttgctgtcattggcagaggctagggagaggggaccctaaggctgccactgactctactgatatattcctgggcctctgaaaggccttggtgacaggaactcataacactgctgcggcattttacagtttacactaatccaatcctgggtacaggagggcagaaagaagtttgaagctcagggtggcccactaaggggggttcttggctcttctagaatcagctgtctgtcaagcacaggaccaaaacaaccccacactgtctggttgctcatcttatgtcacagaccaagaaatttccccatgctaggaagggacagaactctctccctgccccagacccaaggcagcagcataccgttcatagcagtgaaaaccagtgtttctgagcaccaccaatgcacctggtgctgtgcaaaatgcttcacttggatttgattaaatccttgacctcacaaccaccctaccaggagcaagctactgtaatcactacccccattttacagatgaagaaactgaggcatgcaaaggttaagtaacctgcatgagttcacattgtcaagctttgactccaggtgcctcttagccccttactgaccctaaagcagagctctcatgtctaaaatttcctctgcttgcctgctcagctcttccctgcagcaggaagagaaccatttcttctgactctgcagagcctactaagtgcaactcaacctttattcgtatcctagacttagaacccatggaggcatgaataagattttgaaaatctgatttccaggggggccagatggtcaggagttgactatatctagatgcaggatggggaggcaatgaaccactcactcagagatgtccccttcagaatcaggacctctgggtatgactgccttagccaggcaggaagtgcctccctgggcgtggcgggggtggctcagcatgtctgacccccagagagctgtggggccagctagccacagggaagcagagctggagaccaagtcccctctgtcctttcttggaaggacatggaagtcacgtcttaacccatagcttcatcatggccttagtggagaccagccaactgtcaggggtcatggccatcagcccccagttggctaaatggacctctgagtcctaaaaggctaattaagacctctgacttctgtgttcttggtcccctgtcatccatacctgtgctgtgattattagagcatgccttttcttccctcccaaccctggatggagggggtccacatagccctccctcaccctccttgccacagacaccaagcccttgtttattctgaaagtgtcagttgcatttcatgaactcctaagcgggaccttggacttctgactcctagaaaacagaaggcagcttctactagcaaccagaccccagctttgcactcagggctgacattctttatcgatggacctctctgtgactttatttctacatcatctgtaaaatgaggatcgagatactaacacacctacatcgcaaggatcatgttcgttaaaacaaatgcttagaataatgcctggcatattgtcagctctaaacaagcattctctgcaattactattattaccgcaagtatcatcctgagcagcccctcccatgccaccatttcagcccggcctgcatctccacccctgaggccctgcctcattcttgggtctgctctatgtcttttgtccctcatccctcctcctcctcgctcctcttccctccctgtcagtcccccgctgctcctgcagtcttgtgccgactaatcatgctgctgtcagttcagattagagcccattacgttccttcatctcagcttaaaatttttgtggtttcccaactctgcctaaagtgctccacgagggacaagggccatccagctggagggtgcttcaggaggaagaattcgggtctgtgagtcccctggtgggctttcctccttcctgccaattcgataagaggctggatggtggggagtgggcaaaggagagcagtccctcctggactgccatcaggagctcaggccccgagaccagggagcgggaggtcttggcatcccaggaccctcgaggtagactcatactggtgtcgtgtgacagcactgctctgggaccacatttggtcactccatttgagaattcccagggctgtgaaattttgcaactgagagactcctggcaaaaccactgtgctcagcccctgaaccggggtctatctccttcagccacaggcatggcctgtctttgtgatggcgttgtccatagtaacccttggaccttgtcacaagcctgccttccaacagcccaagctccaaggatctcaccagccatggggtccctcaggagccctgggcaaagctctcaggaagagacaaaagcagaagcaagaggcacgggcgggggttggatgcaaggaaggaaggaagccaagaaccacccgttttaatgctcttgttcagtgggcctggtattgagccaggactttgcccgcctcatcctatttaatttccattaacagcccctgaggtaggtgcacctatcaccacttgacagttgaggaaactgaggcacagcgaaatgaaaagcccttgcctgaggctggaaaggggaagagcaggattttgaatttacgttgcaaagcacctgatggggagagacaggagggcgacccctggcagcctcagggctgtctggctagtctcagcctctagaaaagttgggtccagaccctgaaattctgtgtctgggtcttccttgtcctgtgacttgggtattacgtgttaataatcatatttaacctttgtgtagcgcattcctgtttacaaagtgtcttccgtggcctttctttttgagcctcgccatagcccacagggcaggcaggggtgccttatcatccctcttttgcagataaggaaactgaggctcagagagatgaagcctcttgccaaggtcacagatggaagatgacccaaccagaacccaaagcaaggtcgccagggcccagctgtgcagtgaggacaccacactctgacctctttgatggatggtctgcattcaccccaccatctgcaacgtcctcagttgggccaagatctgagaggcttccaaggggtacgcagccaggggctctcatctgggcccctcaaaccttctccctcccaaagctatcagttcagttgggaggatgtcagtttgtctgtacggaacaccagggagaaaattatcaccgccatgaaatgcttcccgttccacatgacctgacagccttccagccagaaatgtccttgcatgtggcccagtctcatcctctcactaggcctggtccttctttatcccctgaccagaggactcccctctgcaggggcttcaggaaccccagagctttcttggctccaaactaaatggtctctgtttctagtgaaggttaatggcagtccttagagtttccaagttcctccttttactctttttttcttttcttttcttttcttttctttttttttttttttttttgagatggagtcttgccctgtcacccagcctggagtgcagtggtgtgatctcagctcagtgcaacctccacctcatgggttcaagtgattctcctgcctcagctctggagtagctgggattacaggtgtccaccaccatgtccagctaatttttgtatttttagtagagatggggtttcaccacgttggccagactggtctcgaactcctgatctcaagtgatccacttgcctcggcctcccaaagtgctgggattacaggtgtgagccactgcacaggcctcctccctttatgcttggtggctggaaatgtcacacccctgcctaaaaaccccaggtaagtccctcagctcttccccaccatccagcttaccttcccagacccatacctccaatgcccctcaaggtacaccacagccccatcccctgagccaaatcacctgtctctgaatgctgaccacgtgttcccagctctgtgcctttgtatgtgccagtcctactgacaatgactttcctgcctttgtccatccaactcactcctgctcagccttaaagactcagccgtagaaagcacttcctcttctgagcttccaccatcggactgattttccctttatgcctgcactagcattgtaggtgtctgtccatctgtccatctctctccccacactggactgtgagcttctatgagcaagaactggctctcaagccacctcgattcctgaaaaaattcttccccttctttctttcctccctcctctcctctctccttcaataaatatttaaacagtcctgtgatgtgccaggccaggtactgggggctcaaggatggacaaaaaaaggcatggtcctagttttcatggttgttcaatctagtggctgatgtagatcatcaaatatacataaaattaatcaaaagattcatcaccactgtgtaagtgtctgttgaagaactgcagagtgctggcttatgcagtccaggactacctgacctttctttttcttttctttttttttttgagatggagtcttgctctgttgcccaggctggagtgcatggtgcgatcttggcacactgcaacctctgcctcctggttcaagaattcttatggctcagcctcctgggtagccgggattacagaagcataccaccatgcctggctaatttttgtattgttagtagagttgggttttcaccatgttggcgggactggtctcaaacttctgacatcaagtgatccacctgcctcggcctcccaaagtgctaggattacaggcatgagccaccgcgcttggctacctgaactttcttaagaagtacctggtgctgaggagtaggttcctgtattcaaatatttcatagcaatccagcaacatgttggctgccttcttggacagtggccactgtagtttcagcttggggtcctttatggacttctgatcctttttatctatctttgctcaaactcatttatcctcatgtggccagtgtagttacagcttggggtcctttatggacctcagaccctttttatctgtctttgcccagactctttcattctccccaccaggcatttatgggtctctcctagggtagtctagcccatatcatcttgggtggagggtgtctgcctgtgggacagtgtatatgagcagagtaggggagggcaggacccccttgacttgggtagctacatgtcacctgtagaatctcctcactatggggagatgtaagaacagccattgagttccaagctgaggttggaatcctgaaaaaaacaaactggaaggctctggcttctagaggagtctagaaagattgctgtaactgtcggcaaaagaaagaagcaaagagcccaattcattctcctgagctagggcagagcctggaaaaagccaaggtggccaggggctgagggtccctggtggggccagagcatggatgtcatgcttcaagtgggcgtggaggtgccttggtggacattttcatcaagacacaaacagtgatgctgagcacggcagggttagcacagctggctcacccatggcttggtttgtaactccagaccaggatactcatcctttatttacagccagtgaattcgcccccaagatttggagaatgcttactgtgaccacttaggtgccgccctgattgcagccaacaaacacctgtgaaacacctcgaacatacaaaacactgttgggttgcgatggtataacaaattcaccctggctttgttctgagctagtcgccctgttcctttaatgtcaataccttaggtacaaagtgctgaagatgcagccacgtcctcaatggactcgcaacctcatgggactaacttcacagcgggcaatgtgattgactgagtccctttccttctctgggccttgggctcttgctctgtaataacaaggggggtcagcctacccgaccttgggttttgccaggcctcataagattccaatgtaggtttacacagaaggtcactggctgatgtgcaggggtcattaagtccccctaagacaggtgccaggaaacctaccaattggataattaggcttgccccgaccctacagcccttgagggagcagacctggacttcagctgccctccccatggggcggaagtgccggcactgcgggggtcccctggtggaatgtggctgtggtgggtgctgggacagagggcttggctgacagatctaaggctgccgcctgccaccaggtctccgtggggccgccagccggcccccctcctgtggaatgacgagctcactccccccacctggcgtttaatctttaatgcagtcccagctgccctcgggcaggacccatcaacccacccgctctgataaaagcgataattagctctttttcaacttttcacttctcccccctccactctgatgtgtgagcattgggaggattccagctaatgggcctgcccacagccaattcccgggccatgcaagccggaatgcacggggtcattagcggggcctcccgggcaggggcctgtgctcgggacgggacgtgctcgcctgtccgctctggggcatcccagccactggagagccggccggatctcggcagagcagacctgcccagacaggctggatcccaccttccttggtggtggcccctgcctgcaccacagcagagaccacaggaaggtggccttaggccctcccagcgcccggctgagaggacacggggccatcagtccccaggcatcgccctgctcccagggcagacagcccagcctgggttcagccaccggtcagtgcggaggctgctagctgggatcccccaccctagccccacaagtgacttataataactaacttgtacatggagccttatgaagtgcttccagttctgaggtagccgcagcccaaggcttaaccatgcaggctcaggagctgggctgtacgagtcaaatcctaacttccccatttgtgttatgaggacggaacctctctgtgccacagctctcacccgtgaggtggggtcagtggccgtggtgcctaccatggaggctgatgtgaagattgagatgatgcagtgaagtgcttgacatggtgcctggcctgtctgagcattctgtccccgccattgtcactatttggttctctcaataggcctctagataattgctgttaccctgccatgcagaggttcagaaaggttgtgcctgggaatttcccaagttttattttcttaatgataattgatttaaccagtcctcacagcaacgttgcatggcaggtcctgttactcccattttgcagagaagcagcttccccacggctctgtgctggtacatggtgggtgcagaaatattttctgctactccaagaatcttgccttgtttggaaccatctgctgctgggcaagcccctggtcctactgcaggtgtctgaggatccaggagacaagtgggagcagggcctgatctgagcttgaggggtgggagcctggtgctgggcagggtcttgaaggggaagctggtgggggcagagggggttccatctggggattaagaaagaccaaggccaggctgggcgcagtggctcatgcctgtaatcccagcactttgggaggccaaggcgggcagatcatgaggtcaggagatcgagaccatcctggctaacatggtgaaaccccgtctctactaaaaaaaccaaaaagaaaaaacaaaaaaaattagctgggcctggtggcagatgcctgtaatcccagctactcgggaggctgaggcagcagaatcacttgaacccgggagacggaggttgcggtgaaccaagatcacaccattgcactgcagcctgggcaacagagtgagactctctctcaaaaaaagaaaaagaaagaaagaaagaaagagagaaagagagagagagaaagaaagaaagaaaaagaaagaaagagagagagagaagaaagaaagaaagagaaagaaagaaagaaagaaagaaagaaagaaagaaagaaagaaagaaagaaagaaagaaaaagaaagaaagaaagaaagaaagacagaccaaggccaggtactgtgtcagctcatgcctgtaatcccagaactttgggaggctgagacaggatgattgcttgagcccaggagtttgagatcagcctaggtgacagagtgagaccctgtttcaaacaaacacattaaaaaaagaccaaggttagcgcacaggtcatgaactggtcaagctccatcatggtcactctcaaggcaaagcgacagcttggccctgcctatttccctccatctgcagactatgtgctgctttctatgatgtccgtcccaccacaaggcagtccttgccactcactgtcccctattcctcctggattccagcgcccaagcaggaggggagtgtgtggggagaaagtcacacagcatgggcctgggaccctgagggcatctagggctggacaccccccaccagagtccaggccaaaagaagtccccaaatcaacactattgggtcttactagggctttccagcttcaagtcaaatgctacagactgtgactctcccacgttcctgaggggactacagaagacccacaagctaatgggtgtgcccctggaggaggtcgctagataaacagaaagagaggaacttcagaagagaaagaatctgctgcgaccgctcgagtaccaagaacgcttgagcagcagctcagcagcaccaggcagactctggcttggctcctcttcctttgtttctgaccagctgcggccaatgcctacaggcttgagacctagttccagaaggcggccagcacctggaactgtggagcctccatcagtaatgcccaggatcaccagcacccagatttcccagggctaccaaagtctagggccactgtctccaatagtcattagcaggaccactgatgcctagaatccgaggctaccattagccaaggtcaccttcccctggggttgttgacatctggaaccacttggaccacaggacataggacctagaaccctggaggagtccacccagagctgccataaactagaactctaggttaccatgagccagtattgggggccatagagtcactgatgtggagtccatccttggactcacactggattgagaagcttcctggggtgatggtgcttggtgaatggcttttcttgtgcaggctctgggtgtacctttttttattttattttttgttttttattttttatttttgtagagatggggtctcaccgtcatgttgcctaggctggtctcgaattccagggctcaagcaatcctcctaccccagcttccccaagtgctgggattgcaggtgtgagccaccacgctggctacctttctttattgactctgctccatagcaaaatatcatggagactcctgaaccccttgcttctctcctacctgggtcctgggttctggctgtgaactttccaaagaggaaacaagaggtgtcatgtgggtgggtcctgcacacccaggacccaggtgaggactgctcaaggagggagggggtacatggcctctaatgtggtctcctctttttccagaaaatacactgggaagtaggccaaagggtgtcctggaggaggttgtatgaatgttccggagacagagcagagcattactggggatggatcacggggcctggcccatcctaattgcatcccctccatcccattcacccaaaggccaacctttctccacatttttcagcgttaggcactaccgtgaccttgctgagataccccaaggaaaatgtgggaaagaacttttctctttccacctcccaccctcccccagccaacaaatagatggcctcagagcctcaaaaacatgcacagaaaaagttccaaactgttaacaactgaaatcttagcagtatcaacaaataaatgttgtacatgtaaaataattcccatgggatgccttggcctgctaccccaagggtttccattgccaagttcaaggttgtcccaggaagagggctgctcagctgttctctgcccaccctggccatggcctcttcttatgagacctggcctcatctctggactgacactgtatgtgaggagggcacaagtaagacctggagaaggaaactcaacttgggaatggaggagcattagagactagggccaggaggaaagataggaagcagaggatgaggaacgacacctgaacagaaaatggtgattcttgccttgggaatcctcgagtttccagtggaatccttgcctaatgtagccagattcaacagagagtcagacaattgcatatttcaacagtaataataaccagtcataataacagcacctagcctccctcatacattgaaacattcgtccattgctggtaggaatgtaaattggtgtaacttctctggaaaacggtctggcagttcctcaaaatgttaaacatagcgttaccatatgacccagcaattgcattcctaggtatttacccaagggaattcaaacaaatgtccatgcaaggacttccatgtgaatgttcatagcagcattattcataataaggaaaaggtggaaacaacccaaatgtccatccactggtgaatggataaacaaattgtggtatatccatacaatggaatattatttgaccataaaaaggaatgaagtactgacacacggctgggtgcagtggctcacactcataatcgcagcactatgggaggctgaggctggcggatcacttgagcttaggagttggagaccagcctggccagtgtggcgaaaaccctgcctctactaaaaatacaaaataataataataataatagccaggtatggtgtcatgtgcctgtggtcccagatacttaggaggctgaggtgggaggatggcttgagcccagcggggcagaggttgcagtgagccaatatgatgccactgcactccagccggggtgacagagcgagaccctgtctcaaaacaaacaaacaaacaaaccaacaaacaaaaacaaagtactgacattgacacacagacaacgtaaatgagcctcgagaacataatgctaagtgaaagaagccagacacaaaacactacatattgtatgattccatttatatgaaatgtccagaatagaaaaatccatagacacagaaaacagattagtggttgcctaggactaaggggaggagggaatgggagtgattgctagtaggtatgggttttgggaggaggtaatgaaaaatgctctggaattactggtgatggttgcacaactctgtgaatatacactgagtatatacaacccactgaattgtatattttaatagggtgaactttatgtgaattgtatccccatagaactgttatttagaatatgctaggagattgtgttaagcaggttgattgctgttgtatttcattcttacagtgaccccacctggaattaaggagatatatagtgggggtagttaagggcacagactcttcagtcaaactataggggtacaacctcagctcattcccctctagttcagggaccttggacaagtcactcaacccccgtgagtctcagagtcctcatctgtagaatgggcacaaggatctgtatcttatccacacagcacagtgcctggggtacagggagtgcacaggcatcggtactgttagatgtagtaggaattcaacaggagtacaatttcaccacctcctcccatccttttctatatatatacatatacatatatatatatatatatatatatatatatatatacacacacacacacacacatatatatatatatacacacatatatatatgtatatatatatttttttgagatggaatctcgctctgttgcccaggctggagtggagtcgcatgatcttggctcactgcagcctctgcctcccgggttcaagagattctcctgtctcagcctccctagtagctgggactagaggtgtgtgtcaccacacccagctaattttgtatttttagtagagatgaggtttcaccatgttggccaggctggtttccaactcttgacctcaggtgatgcacccgccttggcctcccaaagtgctgggattgcaggcgtaagccacggtgcctggccctttctatttcttgagccccctggaagtacaatcacccttaaaggatgaggatggtgaagagtttggagaaggagcagcatttaggaaagagtgtatacccgcttctcgcattcaactcactgcactgtgttcagcagtacagtacaaggtagggtggggagactataatactagctaatctttattaggcactttggcagcagttgtatgtgttttttttctttccatgtcatcccagaaaggtggtttggcctggagataccattaacttattcattactgaacaccatctacaagccaagctctgtgctctgggccataaaacaaagtggggatcaagacagccaggatctggtgctcagaggcttacattctagtggggaggggaggtggataagaaataaataaacgaaaagcaatgtctttcccaatcagctgtaatgcaatggaaattaatcagataaagggggaaggactgccctacataggcattaaaagaagatttatctgaaaaactggtttctgagctaagataggaggaagatgtttgaggtagagggaactgaagtgaaaataagcccagcacatttatttatttatttatttttattttattattattatttttttagatggagtctcactctgtcgcccaggctgaagtgcagtggtgcgatctcagctcactgcaacctctgcctcctgggttcaagtgattctcctgtctcagcctcccaagtagctgggattacagacttgcaccatcatgcccggctaatttttctatttttaatagagacggtgtttcaccatgttggccaggccggtctttaactcccgacctcaggtgatccgcctgcctcagcctcccaaagtgctgggattacggcatgagccaccacgcccagcccagcacgtttaaagaacagcaagagagccaatgcagctggagctggggcagccagggagagtgacacaagctaagacacatgagggagccagggccctgttacatagagcaagcaggtctgcgtgagggacttgatttttgtattcagtgtagtaggtggcataggaaagttctccagccttctaatgggaaagaagctgaagagaacatcagaatcccaagcaataggtctagtctgatatctcttcatgcttaaggcaattgagtcacctgcaacaaatcctttggtttcccccacaatgtcagctgccttgtactgtctctgggctaaatggagcaagaatttttttttttttttttttttgagacagagtctcactctgtcacccaggctggagcgcaatggcgcaatctcggctcactgcaacctccatctcccaggtttcagtgattctccctgcctcagcctaccgagtagttgggattacaggcgcccgccactgtgcccagctaatttttgtatttttagtagagacagggttttgccatgttggccaggctggtcttaaactcctgacctcaggtgatccacccaccttggcctcccaaagtgctgggattacaggtatgagccacggcactgggccgcaagatctttaccactgggattccttctggtgcctggtgttgacccaatgaggtgagcagcctccttcctcctccctagatgctgccctcctgaagcatcttccttctgggaagtccgggtggtgcacatgagtttaggtgttatttttcccgtgctttagatcaagcccagtcttcagctgtaaattgattgtgaagaaatggaggctcatagatccctacttgtgctaaccttgtcagaaatagatgaggaatgtctgtgatgcggagggtgcaatgtgctgaaacttactttccccataagatgagatattcagagtaattcatttgaaatctcgataagggaacagtgcgtgtgtgtgtgtgtgtgtgtgtgtgtgtaagatagagacagagagagagacaaaatgctatggcaggaagttttcactcggccaagttttaacaacaaacaaggagcagtttgtggccaagcagtcagtccagggggaaaaacaaacaggcagagtgggggcttgggtgggggttgctgagaaagccaggaatgagtttatcatgctgcttctggggtgaggaagaaacacaaaacatttagatctttcacctggttgcccacagataccgtgagtagccaaccctgtggtcagtttccccttcttcctgatagagagagccctggttttgatcagatacccgttctcccctggggaagggatcgccatcttcagctaagggataaatcatgactcacctaagccaggtgtggttattcctttttccttttcagagactaatttgcacatagatgcagtgctagccaatgacagttgaagggaagttctgcctgggactgcagaaaggtctcctttctcgaaaaaggattcaagaaggggccaggtgtggtggctcatgcctgtaaccccagcactttgggaggccaaggcaggcggatcacttgaggccaggagttcaagaccagactggccaccatggtgaaaccccatctctactaaaaatacaaaattatccaggtatggtggtgcatgcctgtaatcccagctacttgggaggctaaggcaggggaatcgcttgaacccgggaggtggaggttgcagtgagccaagattgcactattgcactccagcgtgggcaacaagagtgtgactctgtctcaaaaaaaaaaaaaatgcaagaagaaactgttcctcttatacttcagttattacaggaattgtctgcagtccccagatgtgtggtagccccttggcaccatgagctgaactggcaggcacttggagggagggtcaagcagaaaaacagaaaaaatctgaattttcaatgatgcctttgggcccctgaattgaccaatccagaggttccctacctctggccttcttatgtgaaataaattttccttcttatttcaggtagggcttccaggtacttgtatcctgattgatgctgtcactctcactggaaaacaattggaaggtaagaaccatggcttccacctctctggattccagtaccctacaccaaatctggcttattataggtgctcaacaggtgggcggatgtatgggtgggtggcttaatggatgtatgggtggcttggggagtagatggatggatgaatgggtgggtgagtggatggatgggtggggtggttggatgggtgggtggatggatggatgggtggggtggatagatgggtgggtgggtagatgagtggatgatggataggtgggtggatgtagggatgagtgggtgggtagatggatgaatgggtggctgtatgaatgtatgaatgggtggtcgggtagataggtgggtagatggatgaaagggttggatgtgtgtgtgggtggatggtggctggctggctaggtggatgagtggctggataaatgtatgggtgggtggatgggggttagatagatgagttggtggatgggtgagtgactgggtagatgaatgtatgggtggctagatggctggatggatggctgggtaggtggatgtgtagggtggctgggtggctgggcagatgaattagtgggtagatgggtggatgggtggctggttagctggatatatgggtgggtgggaaggtgggtagatggatgtatgggtgactggatgggtaggtgggtggatggatgggtggatgaatgggtgggtgggtaaatgagtgagtggatggataggtagatgggtggatggatggggtggatgggtggatggatgtggttggtgaatgggtgggtggctgactggctggctggataaatggatggatgggttggtgggtgcgtgggtggctgggtggctggctgactggatggatggatggatggatggatggatggatggatggatggatgggtggatgggtggctggacggatgatggatggatggatggatggatggatggatgaacgggtagctggctggctggttggatggataggtgatgggaagatgtgcaggtgagtgggtgggtagatggatgaatgaatgtgtggatggagctcaccatctctcatggcaaccttatcacagcatctgctcttctagttctcattgtattctcaattcaggttagagtggactgaagaggcataaagtttcaaactcaggagacttgcatgaagccttcacatgaacacaggcctgttctccacttggagatgacaggaaactttcccaacaaaggcctcagaaacagtgtccttgcctggggtttcctgcagaactctgcttctcccttgaagatggggcactcccatctctttggggcccctcccgggtctctgcctcccaacacacaaagcaggagttgtccacccccaccgtaaagaaaccagctgtgggatctttcagcaggtctccgcttgttccaaagcctcagtttctacattggataaaggggaatggcagcggccctagagaaaagacctttttttttcttttttttttgagatggggtttcgctctgttgcccaggctggagtgcaatggctccatctcggctcactgcaacctctgcctcccgggttcaagcgattctccctgcctcagcctctcaagtagctgggattaaaggtgcctaccaccacacctggctaatttttgtattttttaaagtagagacagggtttcatcatgttggccaggctggtctcgaactcctgacctcaggtaatccacctgcctcggcctcccaaagtgctgggattacagatgtgagccaccgtatccagctgggatgaccttcttagacagcctgtgtcacagaatttgtagttccctttaaagatgatgcttggaataacccacttccagcaagagtggacagcagcaagaagactttgtttcatccttcagctgagtcgtaagttgtttccttttgtacatgtcacacatgaagaagagagcaagccctggtgcaggatggcacctgtggctatgaaacagaagaaaatctatggccctactagggattgacccatgaccttgaccttttgggcaaggagcaccgacagctaagccatcatccccaacagcccagtgtgcatcagatggtatggacgtgcagcctggaacagccccctggaagacaaacagccaagtcattaatcagttgctttacccctgtactctgtgtgtttgtgtgtgtgtgtgtgtgtgtgtgtgtgtgtgtgcgtttgttgggggatggggtaagggtattgtgtgcctgtgagtatgtgcccagccctccagaccagggtcctcaaagggacctgccccagtgtgaaggaaagaccccgcccagcaatgagggagtggccaggacatctttccacagcatctgggaggaacgggcagggccggatatgggctgccgaccttctcccttcctcctgaagaggaagctcctcctgcgccacctttgtgctgaccgctgggtggttacgaatgtgttccctgcctgtcgttctcttcctgagcagtgaggagcagctcactcagcccagcccagcccccactcctgagatccagcccatgaaggagctctgtgtcctggcttctgaccaggctgatgggtggggtgggaggcaaggaccagaggctgagtcaaggccttcacccagcctcttctggagcatggctccctcacctctcccataaaaaatagacataaggtcggaaaggacttccctgaactaacaggacagggcctgcagaaggcctgaaccctggccagcagacaggtgatgagcatgtctacaccaggaaggtggggaataaattttattttaaaaattaaattaaatttatttaagagacatgatcttgctctatcacccaggctggactgcagtggtgagatcatagctcactgcagccttcaacacctggagtcaagccatcatcctcatgcctcagcctcctgagtagctgagactacaggtgcatgccaccatgcccagctaatttaattttatttaatataacactccaataccatgtatcatgtgccctttataattatgaactgatattatataagcctcataacaaccctatgagaaaggtgctctgattatgcccacttcatataggaagaggctgaggcacagagaggttaagcaacttacccaagatcacccatctagtaagcagcagagcccagatctgaattcaggctgcagagttgaagcttttacctaatatgcaatgccacctcccagaggcacaaaaataaaagcattgcttgaacaccagatgtgtgccaggcactgtcacagagtcctacctggagctcactaaccaggtactctcaaatacatgatttcatttagtcgtcacaaaaaactcataaggaaactgaaggtcagactagtataagttgtaaagagtaagttgtataaagatgcacagccagtcactggcccaacacaggtctctctgatggcaagacaagatggctttcctctccaccgggagtacgtatcctagaagcagttgccaatgaagggaagaggggcttagatcattcaagtagcctgccgaggtcaacagacagcagagggctgagccaggattcaaacacaggcctttctgatgcctctatgagccactgccaaggcttggggctcttccgggcccagctcttcccaggactgcaattccccaggcggggcttcctttggaggaagaagaagcggaaatgtcatgctctggacccacctggtaaagagaggttgaccgtggcagtgagtactcggggcacctggggccagctgacccttgtgcttcagacacaggtgttgggctcggtgggaaggtctgttggtcctctgctcttacctgagcatctcctctttctctccagccccagctcttggcataaacaacactttggagaccctcagtgcaatttagctcccttaactttttttttttttaaagggctcacacctgtagctccagcagattgggaggctgaggcaggaggatcggttgaattcaggagttcaataccagcctgggcaacatagtgaaacctccatctctacaaaaaaaaaaaaaacaaaaaacccaaaattaagtaggcatggtggtgtgtgcctgtggtcccagctactcagcggggggggtgaggcagaaggatcgcttgagcccaggagtttgaggttgcagtgagccatgatcgtgacactgtactccagcttgggagacagagtgagaccctgtcttaaaaaaaaaaagtgtgtgcgctattttctgaaaaacaggagcagacaaaaaggccccatcaatttctattttgccctgggccccttaaccacaactccatttgggaatggccggtagaagagttcagtctcggcactgtgggagagcaggctggggggcagctcagcctgggttaccgaccctctaatcccccaatggtggaatgtgcttgattccaggaggctaaggtttggagggtgggtgagctgcagaggctgctatggccctgctgtttgacgcttcatgatagatgagcccccagtcctcctgtctctgtgtcccccctcctcccccaccgcccccctcactctgtgaggtctggcttgtgcaaggaagcctgtcagtgtcaggacacgttggcctcatggcccgcagcgggaagggggcctctgagggatgcctgctgtctggccctctcctcaagaggggtcctctcaccctatgcctcagggtcctgggcgcttccctttcaaagctgcaaaatgatcgccattaatgcagcttgtctcctggaggcgctgaaaatagggtaagggaggaagggcccctgactgcctggcctccgagaaccggcatcggtctggcttagttgaggctggatgtggaagagagaagggcacaggctagcttggtggatgttgagtggggattttgcccgagggggtgggagccattaggaccaccctggggactgctgtgagttcagctgtggacttctgcagagatgtggccgccatctggctgccaatgaaagaaccatattgaagcctgccatgctgggagcaggggaagacaggccacatccccagggtcagcacctgcaccttccggagactcagtgcctcccaggggcctccgtgcctcactctggccctaacctgaaagtcccattcacctccaacagaaagctcacctgggactgccctcataccccactctgagatccactctttcgatctgagggacctcagaggagcccaaatggaggagctattcagtctggaaaactggggacccactttgtacatctgcatgaggaggccctgggctgtcaggctgggagaggtgggtctggtggaagaagtaccatccaaggcagctctgccttccaggagcctgcagtctcatcagaggccaaaggttacaatccagaccagccctgagccatagaaatgtagcatgagtctcactctgtcacccaggctggagtgcagtggcacatacatggctcactgcagcctccaactcccgggctcccaagtaactgggaccacaggtatgcaccaccacccctggctaatttttaaaattttttttgtagagatgaggtttcgctatgttgcccaggctggtcttgaactcctgggctcaagcaatcctcctgcattcgcttcccaaagtgccgggattgcaggagtgagccgctgtgcctgggaagatgcatgtatttaatatgagccatgtatttaattgtaaatttctagatggcacatttaaaatggaaaaaggagcagaggaaattaatacattttatttaatccaatacagatgaaaaatatcgtttcaacataaaacataaatgtaagcatattaatattttacctttttacctttttctgtactgtcttcgaaagccagtgtatgctttacagtgacatcacatctcgatttgctctagccacgtttcaagtactcaggagctgcatgtggctaacagctagcgtattggatggcacagctctagacgctgtggcttgggccatggcaacagcacctttattttttgtttaacttttcttttaagttcaggggtacatgtgcaggtttgttatatacgtaaacttgtgtcagatattaagcctagtatttattagttatttttcctgatcctctccctcctcctcccacccagcaccttcctttcaacagaagaaaattccagatggaatgcacaaggtacagtgggtttggaggcatggagaagccggtagaacttcctccttggaggctttcagtctggactgggctgctcctcctcctggcaggctgaaggcaatctagctgagagtatggctcctgagcactggtcccaggcctgggttctagaatgtctctgtctgcagggctcacttgctgctgtgtgtgtcacccgagaggcagcatagagtaggaaggggggcactggatggggggtcaggacattcaggttccagctgggctctgaattctgcacaatcgggcagatcacatccctttctgggcctcagtttccctgtgggcaaatgagcaggaaggcaattactcaatacccccatctcccactctccccttgaaaccccaaggactcattgagtggcatgggtcgggatgatacaggatctcctgcatgctcagggcaagtcctgtggcgctctcctgggttggcactctttgccacctgccaaaaacaacctccgcttccacactggcctgacacagctggagtcaattcactgatatttactcagccctccagtgtgccagatcctccgagtgccgctgctctagtgactctcacggtggggtaaggcatcctcaccccacatggaaatggagtaattcctgaagatgtcctcttagccatcacctgtctagcttggagtagttgagcagattcatggaaagacatatgcacctctttgtcctcaagaagcatatgatccaacctggagactgattatgtgtggaaagtcaatactccagcaaggtgaatgccaagaacaatcaaggcaagggagtggaaaggctgccacaggctgagtggtcgggaaggctgctggaggaggagctgggatctgagccagcttggaagcggggacaaatcacttcagggagccagcaaaggcacacaggtgtgaaaacacacagtgtattagagcacccagcataggatccatgacttgagcccacggtcagctcatgcagtgcagggaagcagaggctccaactttgggaggtagaggtgggttggtctggggaaggcacgattccaagctaaggaagcaggagcagggagccactgatggttcctgagcaggagcatgacatgcatatggcggtgccaaggcaggtgaatgtgaaggcaggatgcttggagaggaaggtgggtgcagagggaaatggccaggagcacctgtgacaatcactgtgacaataacactcaaaatggaaagccctttcatgccccttctcatttaattctctttcaactcagtgaagtacatagaatgggtagtattgcttccttattaaagataaagaaaatgagtttcagaggaattaattgatgtgtccaaagggaccagcttggagaatcagactcaggctttgtgtctaaaaatactgaactctttctactatcccacatcttaatggtccaggaaaatggggtcccaaaaggagacagagataaccaaagaaggctccccagaggggtgaagtacattgagaggagagtagaactcagatgatccaagcatccctcagaactcttcacacttcaatactgacctggtgtatctgatccaactggtgcttacatgcccaaggtaggagtcagtgaggcctaaatttaggtctcagctggccatcagcctgctgcatagctttggatgttttacgtaacccggctgagtctcagtgttgtttctcatctgcaaattaagatagctgggcactgtggctcacgcctgtaatctcagcactttgggaggccaaggtgggtggatcacctgaggtcaggggttcaagaccagtctggccaacatggtaaaaccccgtctcaacttaaaaatataaaaattagccgggcatggtggcacacgcctgtagtcccagctactcaggaggctgaggcaggagaatcgcttgaactggtaggcagaggttgcagtaagccgagatcacgccactgcactctagcctgggtgacagaatgagactccgtctcaaaataaataaaataaataaatataaattaagatacctggatatgaggagctcgtaaggaatgaatgagatcattattagtgagagcccagagtgaccaatctctcagccagcccctcaagtctacactaggccaacccccatcgcttgatgtgacacacaagtctgttccacacccacgattgaccagaagaccaccatcctccccctgcagcttcccctagcctcatgccacctctgccttcctcacacctcctctcctgctgtcccaaggatgtgcacacctactccctgctccgtatggccccaaagagcagcgggtgcagaaggcatttctctagtctgggagggcttcctagaaatgctgctgagccctgcgaatgcctaatgaccatgggaatcatttagcaagagaaaaagccagacctttgccctggcccagctcacaggtgatggggttaatcgggaattctttccctcctcagggctgctggtaggggtccagctccccgatgacctggggacatattagtcagtgataagtggggctttccagccccttttatcctgtttacaatacactggttttccttagacaaaaccctccttccctgccttgctcctggctgttatggctacatgagacaatttgctgatggactctctagggaggacaacttccttggagtccccttcccacctcctgcagcacccggggcaacatcccctctacttggtgggtcctggagggggccacagatgcttgtttttctcagctcattgcagcctctgaattcagaagtgccaccctgtctgctcagctttaacccaagggggtgaggagaaatccagaggtgacaagatgatgtttccctggctttggggtgggagtgactggggtcattgttgctgtccagagtggaagccatcagaggtgtcctgtttatctgtgtgactcggccctctttgggtcacaaaggccagatgatccagcagctacctggagggtggtttatgacagcagcctggtcctagttcccttctgccaccaacaagcttggccagcttaggcaggtgagttaatttctctgaagtttagtgtccttgtctagaaaactggcatggtgatgcctgtcctgcctcccatgaggcggatgggagcacagaacgagccacggctgtcccagtgcctaaaggggaggcactgtatttggcactttgcactgattccaggtgacggctcttccagcaagaatggctccaccgctaagggcagtttttaatcgcctaaaagccgacttccaaataattctagatttctgaaatgccaagcaggtaggatacttaggcgaataagttaatgaaacggagtccatttccaggcaacagaagtttcacaagcacctacctcacaccgggcactgagctggataccaggaaatgcagggatgtaagacacatcttccaccctcgggctagtgaatggacaactgggacccctgtgacgagtgctgagagggagcaccagtgctaaggaagcatggggaaggggttctagcccagcctagaggttggggccatgccccaaggaaggtgaattcagaatgggacttgaagaatgaacagtaatagcttaggcctgagacagagggaagggtgtttgaagcacagggaacagtgcatacaaaggccagaagacacaaagaccttgtgaggagagctgcaattattctagttaggatggcggaaatgaccaggatgaggccagtaccgagggctctgtctgccacgatgaggatattactgtgttctctagacaccagggtgccatcaaaaggcttagcatggcaaggcaccaactgtgtttcattttttacttttttatttttatttattttgacagagtctcactctgtcgcccatgctggagtgcagtggcacgatctcggctcactgcagcctctgcctcttgggttcaagtgattctcctgcctcagcctcccgagtagttgggactacagacatgtgccaccatgcccggctaatttttgtatttttagtagagatgggtttcaccatgttggctagactggtcgcaaactcctgactttgggtgatccgcttgcctcggcctcccaaagtgctgggattacaggtgtgagccaccgcacccagcctactctgtgttttagaaagatcttttggggaactttgaaaaggatgattgaaagtgcagggggtggctgaagaatgatgtgggcatctcgatgcactctcatattttagtaagggaagtgggacatagtcacagctggccccaacggtgcaaggtggcatgtgagcattggcacaggtgggacacaatagcggggcggccaggaggaaaaataatccgaaagtgcgctgggaaggggagtgaccaggccaggagagtaggggggccactaatagtttaagagaagggataatagaattatcctatttcggctgggcgcagtggctcacgcctgtaatcccggcactttgggaggccgaggcaagtggatcacctgaggtcaggagttcgagaccagcctgaccaacatggtgcaaccctgtctctactaaaaatacaaaaaaattagccaggcgtagtggtgcatgcctgtagtcccagctactcgggaggctgaggcaggaaaatctcttgaacccggaaggcggaggttgcagtgagcttagatcatgccactgtactccagcctgtggggcagagcgagactccacctcaaaaaaaaaaaaaaaaaaaaaaaggaaaagaaaaaggaaagaaaagaaactctttgccttagccaagagaaaccacacagattgcctcctgggtctacctatacccattccaactttatctcactgcctgccaggaatgccctgtgcctgcctttccatacatccttgtagttcaaggtccagctgaaatcacatctactctagaaagtcttcctttgtcataataattcaaagggatctttctttcctgcattctgatagaacttaattgtccttactactcattacacactcgtacactgtcttgcactgttatattttcataagccctgtaccctctcatcccaactacatgagaaactctttgaggttggttatctattgctgcataacaaactagcccaaaagtcagtggcttaaaattcatccattttactatatctcttgattttgtgggacaggaattcaaccagaggctcagctgggcaattctatttcagatggagtctacagaggtcacacagtaggattcagctgacagatagacacagagggtacgatatggctttgcccacatgtatgatgccttggtgggaatggctggaagactggactcagctgggaatggtaacgggagcccctacacgtggcctttccagcatggtggcctcaggttgctgggcttcttccatgatggctggggctcccagagtaagtgctgcaagaagctgagtggaagctgcagggcttcttataacctggccttgaaaatcccagaatttcacttctttcatattctgttggtccaggaagtcattaagaccagcgcaggtttagagggaataaaactagactccacctctcaatggtagcagtagcaaagaatatgagatcatctctattttattacacaatttgccctaagacctaggcaagcagggtccctagctcaggccccaggccagattctcaggggaccccacacttttgagtgctcttcttgaaatattctaagttctcttcagtggctgggatcatcccagttggtttctcttcagagtactctgtgacccacctcttgatctgtgtggttggccaaatgccctgaggcggttcagggctcatgcctatggggttgtccagggcaacctgacaagtagattgcttctgctgaccagcacagtatttattttatggcattgaacaatactgggccactagaatggtactgattggctaatttggggtgattcacattggatatatgagttcagaactctgggctactaacagttcaccaccaacccttgaggttgagccacctgtgtgggtcaatgccctggctctcaccacatttatgaccacagtgccacctctgacatgacacaataatgagagtggatgcatcctttaacctgactgctggggtaccccacctccagctggtacaaggtgttcacccctctccaaggctttgcaacacatgtcaggcaatcctccagaagtggccacgcctatcttctccattcaagaccattatgctgtaaggccaaccagcttttacaatcaatgtcctctcttgcctctgatcaatatagtgatctcatgagatactgggttggttttaagctgttccaggtgagggccagatgttccttacatgaatggaacttctcttcttgctccacccatgggccctgagcctatccactccctcccctgacaactgatttcagtgtgtggaaggcaggggtgcagtcaacactgaaagaaatcaccttctaggaattcagtgattaaggcctaaagaactcaagagaagatgtggttggatgatatattgttgtaaacatacatataaaactctgatcggcgaaattttattcacatttttctgcatactctaagcaaaacttgccattggtgtcatcactaaagaagcacaggaacaaactttgagttatgaagccagtatttgtacgtagagtgaagaattgtgcagcatcatgagtaatgatgtaaccagcattaaataaatggcattatcaacacaaccagctgtcttagtctattttctgctgccataatagaataccacacactgggtaatgtttaaagaaaagacgtttattcagctcacagttctggaggttggtaagtccaagagcatggcaccgtcatctggtgaagttcatcccatgatggaaaagtgaaaggcagaagttagtacatgaaacagacagacaatggcagccaaacttatccttttatcaggagtccactcctgtagtaacaacatcaatccattcatgaaggctctgtccttgtgacccaattgcctcccaaaggccccacctttcagtactgccacaatggcagccaagtttccaacatatgaatttgggggggacacattcaaagcataaaattctccccctgccccccagccaaatttatgtccttctcacttgcaaaatgtattcattccatcccaatagtcccaaaagtcttaactcaatccagcatcaactcaaaagcctgaagtccaaagtctcatctaaatcagatataggtgagactcaaggcatgattcatcccaaggcaaattcctccagctgtgagcctgtgaaatcaaaacaagttatctttttccaaactacaatggtggtacaggcataggatagacattcccattccaaaagtgagaactaggcaagaaaagaagggtaactggtcccaagtaagtccaaaacccaacagggaaaacaacattaagtcttaaagctagagaataatctctgattcatgtcccactcctggacatgctgggaggctggttccccaaagctttgggcagtcccacctctacagcctttctaggctcggtccatgcagcagctctgatggattgagtctcctgcctacagttcccaggctggagttgcatactggtaggactacagttttgtggtcttggagatggctccattcccgctgcttcactaggcactgccctactgcagactatgtggtggctccaatcccacatttccgcttggcgttgccctagtggggactctctgcagtaccagctttaaataaatagcattaggaactggaggggcaaagaaagctacataggccaatacaaacaggttctgaagagtcatggtatttgaataacaatgttgttccccttttctcatgtagccagaaactagtgagaaatagcacatttgacaataacataaagagatagttcctggacccagacagaaagcgatggtgcctgaacactgtaaagaatattcacatgcacttattagacaataaacaaatatctaagtacttttctctactaattattctaaatctttgttgttaaatcactattcttcacgagtccatgaattttataacacagttttgtttgtttgtttgttttttgatacggaatctcgctctgtcgcccaggctagagtgcagcggcgcgatctcagctcaccgcaacctccgcctcccgggttcaagcaattctcctgcctcagcctcccgagtagctgggactacaggcacgtgccaccatgcccagctagtttttgtatttttagtagagaagaggtttcaccatgttggccaggaaggtcttgatctcttgacctcgtgatccgcccaccttggcctcactaagtgctgggattacaggcgtgaaccgccgcccccggcctataacacagtttttaatcaaattgcatatacagactgggcccacaaaaacatttgcttggggctccacaaaacctagatacagtcctgtcaacgtgatagataaataggtaggtatgtaggtattaggttggtgcaaaagtaattatggtttgccattaaaagtaattgcaaaaccacaattatttttgcaccaacctgatagagatatagcaggcagacacacacacacacacacacacacacacacacacacacacacatacaatttcccagagcactactcaccaatgaagtactaatgaaatagctccccctgaaccacaagggtcattggactgcagctccctccctcctacagaatgaagtccaagctccttagactgacttggccacaagctacctttctggccttgtcctttgtctttttgtgcattatgttctagtaacttcaaactgcttgtagtttcccctgcacatcatatatctttgcttttgtgtacgctgtttcctcttcctgggatgttttccccactggccttatcttccaagattcagtttaggtatcatctcctctttgaatctctcttgagtcaccaaactgggctaagtgttccctccttgtcatcccacagttcccaattactgtaccccacactcaccacataggattctaattatctgtatagatgtttacctcccagtatattaaagagcttctatggtaaggtggtgtcttactcatctttgtatatcagcccttgcattgtgcttgacacacagttatcagctcaatgaatctataatgtaggatgatttatggaaggagaccaatggactaagtcaagtggactctggtgagcctagaaaacgttctagtaaaatgaaggagaggctggagggtaagtcatgccaagagaatatcagcagtatatatcaattatccaagtggtttagccatacaagaaaaagaaaaaatgggatataagttaaaaatgcagtaagctggagagtggcattttcttctatttagaggaaggcctaaatacgtataaagacttaagagactgagaggcagaagggagatcttctggacttcaatttccttatctgccttatccacctcccagggatgccatgagacccaaaggaaaacaagacataggcatgaaaattatttgagaaattttttacattactatcctctgatagatttttctgatagcttccaactacccgcagaataaaaatctataaagaaaaacccaatctgacatttaagatttcctggccaggcgcagtggctcacgcctgtaaccccagcactttggaggccaaagcgggtggatcatctgaggtcgggagttcgagaccagcctgaccaacatggtgaaaccctgtctctactaaaaatacaaaaattagctgggcgtggtggtgggtgcctgtaatcctagctactcgggaggctgaggcaggagaattgcttgaacccaggaggcggaggttgcagtgaaccaagattgcaccattgcattccagcctgagcaacagagcgagactccatctcaaaaaaaagaaagaaagaaagaaaaaaaaattcctatgatctcgttctaacctttcttcgactactattattgccccaaacaccctgaatccagccagaggagattcatgttctttccttctgtttgcctttgctcaagctattccctcagcctcaaatgccctcctcttcatctctaccaggcagacacaataaacattttcagagtggttagtatatacaagacactgttaaaattctattgattcttgaaggtcttattcatatgctattttgtccatgaaccgttcttgcccttcccacggaaatggtactttgtatcaattgtagcatgtattctacttaataatgtagcttgagggtatgattagttctcccaacagaccatgagagatatgggaggttttagggctgtgtcttgcttgtgttcctatctccagtatctgtgcatggtacattgtagatgctcaattatagaaaaagtgaaaaaaataattttaggaaaagaatgtacatgggtggacagtctcttgggacacaaaactgggtgggatccaggatccaggaaaagagaagtatcaacttgtccaagaaaagaatgtctcctgccttgggaggaatagtagataagcttggaggatggaaacgggatagcctatgtggagacagagaagtgtccaaacccagtcccagctcaaatgccaccccttcattaagtctctcctaaatctcctcctagagacgacccccagctcagctcaatctctttggattttctaccttctagaatgtttgtcttgataaataaaattcatagaaagccattggtttggactgagctcctgcactaggcgcaacaggccaaaccaaaatagagtcactcatgctaaagttccaagccacaaagccaaaattaagctgctcatctgaccttaggagaaatcagaagagagggaaaatagccatatccccatgataaaggaagtcccttctgccttaaccaatacaagtaaaataactttgaaacttgttctttgtttctgcttttttttttcagcccttttctgtctataaagataatctcctctgctcagctcatcagaatactcattctattttatagaataaggtgttgcctggtgctagaatcgcaaatagccagttaagatctgtaactgtgttgtattaaaggagagaaggttagcactccctttgacaaggatggaagaggcccttgggcctgacaacacgcatacggttaaggcattaccacctacttcgtgggatctaaccatcgtttttgaaatggtgctgggaaaactagctagccatatgtagaaagctgaaactggatcccttccttacaccttatacaaaaatcaattcaagatggattaaagacttacatgttagacctaaaaccataaaaaccctagaagaaaacctaggcaataccattcaggacataggcatgggcaaggacttcatgtctaaaacaccaaaagcaatgacaacgaaagccaaaattgacaaatgggatctaattaaactaaagagcttctgcacagcaaaagaaactaccatcagagtgaacaggcaacctacagaatgggagaaaatttttgcaatctactcatctgacaaagagctaatatccagaatctacaatgaactcaaacaaatttacaagaaaaaaacaaacaaccccatcaacaagtgggcgaaggatatgaacagacacttctcaaaagaagacatttatgcagccaacagacacatgaaaaaatgctcatcatcactggccatcagagaaatgcaaatcaaaaccacaatgagataccatctcacaccagttagaatggcgaccattaaaaagtcaggaaacaacagctgctggagaggatgtggagaaataagaacacttttacactgttggtgggactgttaactggttcaaccattgtggaagacagtgtggagatttctcagggatctagaactagaaataccatttgacccagccatcccattactgggtatatacccaaaggattataaatcatgctgctataaagacacatttacatgtatgtttattgcagcactattcacaatagcaaagacctggaaccaacccaaatgtccaacaatgacagactggattaagaaaatgtggcatatatacaccatggaatactatgcagccataaaaaatgatgagttcatgtcctttgtagggacacggatgaagctggaaaccaacattctcagcaaactatcgcaaggacaaaaaaacaaacattacatgttctcactcataggtgggaactgaacgatgagaacacttggacacaggaagggggacatcacacttcggggcctgttgtggggtggggagagggggaagggatagcattaggagatatacctaatgtaaatgacgagttaatgggtgcagcacaccaacatggcacatgtatacatatgtaacaaccctgcacgttgtgcacatgtaccctagaacttaaagtataataataaaaaataataaaataaagaaaaaaaatctataactacatttcttgtaattttgtcttttgagagtatacatatcttatttcctttcccagaccagaacctctttgagggcaggaggaacccggttttccctactttacacatgacacataataaccactcattcaatgtaggtttactggatggataaataggaatggggggtagataggcgggagagtgagtagacaaatgcgaaacaggaaaagcttgcgccaggaaaaacagtgaagagcgaaatctccagacccccgattaaatggtttaaagtgaagccaagcaagaacctccagtcctctctgcggcagagaacagcagatgatagcggctcgccttcaactttgctctgaggacctctcgttagtatcccgcgattgtccttcctaacgcctgactgaatcctgaggctagccttcagcgaacatgtacaccgccttgcccttcacgtgaagccgagcctgtgactacacttatccttccgtcgccggcctcatttctccttccccttctccgatctcgcaaccactgctagtaaggcgcgcgtgcgggcagccctggccggcaggggagggagggtcctgcgaccggaagccggaaaccggaaggggggctgtgaggacgtgttccgaggaagccagagccggagccgtggcctgcggggccggcgacatggatcccctgttccagcaaacgcacaagtgagggccggtcggggagcgggcaggggctagacgaggcgaggccaggtgagcctggcttctggggctgaggcctcggacgtcagccagggtagaggccgagtttttccgccagggcactgctggggatgcctccgaagtgcttaatccttggcgggactcccaggtcagccacagacagtgggttcaggctggggcctggagacgtggggcagatgactcctggggtctgcaagttcgtgactacctgctgggtagactgggtgacgggaaactggcacctgcaggttataaaactttgtccagcacttgtcaactcggtgctcctggttggtagacctcgagaggagacacggagtaggagacacggcccctggccgtaggagtgtactgtttaattggagagtcagggcacgtacgggaaagtatttgtattcttattcgatttatactaaagaccacatttttatggtacaaagaaattgctgtccacgtagcattcactattattacttgttaatcgtatctggttacaggttatcgctaagaaaatcaaattgtaatttagtttctcataacttaaattccttggtagtgtcctttattcgcatcgtcctgcactttcggaattgctgagatacgtagttgagtattaatggggccatacttaccctatttttgggggcggggggcagaattatgatttttaccctgttttggagggacggaattttatgatttttattttttattgtaaaatatacacaacataagatttactgttttaacaatttttaagtgtacaattcagtgacattgagtacattcacaacttacatcactacgatccatttccagaactttttcatcatcccagtgtgcctgttaatcagtagcacttcatttcttccttccagaacacctagtaacctctgttttacttctctctatgagtttacctattctagatacttaatataagtggagtcatacagaatttgtccttttgtatctggcttatttcacttaatgttttcagggttcatctatattgtagcctgttaccagaatttcattctgttttatgacggaataatattccgttttatgtgtctaccacattttgttatccattcatctgttgatggacacttgagttgtttccaccattgggctgttgagaataatactgctatgaactctggtgtagaagtatctgttttagtttctcttctcaattttttgaggtatatacctatcctattgagaactttcaaacttatgctgtagttttgttgattaaaacacttaaaatcacactcccaaggcctggaaatgaaatgccctgaagcatgaggaataagagggtgatgatcctctttctctttcattttctaagtttatgggtttcttttattttggcgatgaggtgtttcatttggacaggcgaaaatacagaacctactttgtaatgacagaattttcttttacactggggagccctattctcacataaacgttataggaagggacttaaaactagtctgtgagtaatttagagaaagaatgaaacgaaattatgttcatgttactaagaaagggcctatctttcacaatagcagggcacaatgggcatagtagtgccttgaagttaatctgttatgtatggtcttatctagttaatttagttaaaggatgttgccaagaaggccatgacccattttatattcaagaataactttatttagagagtcttagactacctgttttcagtgcagctaatcacagagaaaactgcatggctcagaagaggaattctaaatggtaccccaaacaaggtgtgtggagtgtagatgctctgtaggcctccaacaatgcacccttggactctagcagcttgccagttttttctattaagggccagatagtaaatattttaggctctgtgggctatacggtctctgtagttactactctgctgttatattgggaaaacagccatagacaatatgtaaactaattgatgtacctgtgttccagtacaattttatttatcaaaacaagcagtgggccagctttgccccacaactattaggccctctgctaccccgacactcattaattcattgaatatttattgagcacctactatgtgctgtgcaccattctcagtgctggcagcacagccctgccctcgaggagtttaccttcttttatgctgcagtatcttgtctatctttcctctccagtgctgaaccaggagtgggagttctggttctagacctccttactttatttttcctcatctgtagaatgatattataatttgggctggttaaactgtaaggctcctttcagttccatgataacagaactgatgactgaatgactttcacaagaaacacgtggagtccagtgagcaccagcaatgaactttcgcaactgcagaaattagtgattgtagctgagttgacacaacagtagctgaacttattaattttactggaactttgaacccagtttgtgattatctcttgccgtgtcactgaatacattgagtacattggaattagattgacatattaaagttacttgaaaactcctgaacctacctgaacaatgaatgaatgaaaataatgaatgaatgaaaacaataaacattttacacttaaatgtttaatttagatgaactttatagaggagctaatagccaggcttctatttttgagatcccaatggttgtaaaggtgaccacatttgtcccctatgtagtccaagatcagtctcctgtcctggaccttatcgtatgtccaggacacaagaagcactacatttaacaagctccctaggtggttttgatgagcaggtaggcttaagaactgttaccttatctcaagaccattttttttcctgaacagcggagcttaagaactattaccttatctcaagaccatgtttttcctttatagattttgccctttaatgagcgaaatgtaaaggcaaagtgagtgaaatgaaaatgaccagattgttgccactacttttaagtaaagttaacaacaaacttacatgatgctgtgtaggttacacagcgttttcatgttcatcatggtcagaggcagcctggatgcaaagtggatgttatggggtggtggggggcggtgagtagtttcatgaacttttaaaaagcacttccattaaaaaattcttcctagatcttctgtaaaccttttttaaagacggctacaatgaccctggcttatttgctactatttctctgctttgttatattatcacccaagcccaccatggaccccatgctagagagggctaagacttctttttcctcatgtccacgctcccaagtcatgcttgtgtatcacctgtttcttatggacttccagtgtgttatgttgtgttagaattcccagttcagtttgagacagattttgcacttggcatattagtagttcccaccttgccattcatacttgctttgttgtttcatatttatgttttcttagcatgaaatgtagccgctggaattgtattattggccacattgtctctgattggttcaaagcaaatagagatttgatgggaaaagtcagtggattatgggcctgtacaaaagtgctttgatgaacgtcctgccatgtacatctcctcagggtatgccagaacctctctaggacacattcctcaaactgctgggtcatagcatggacacatgctttattctactagttattgtcagaaagcatttaaagtgttttaccaatttataatcctaccagctgggtatgagagttctagtttccctgtttccttattaatgcatatgtccccaaactttaaaatatttgtcagtttgatgggctgaagaaatgtgatctcattgcttttcatttgtgttttcctagttgagtgtcattttgtatattgattgaccatttgggttttcttttctgtcatttgcccttttttcatttaaaaaaaatgccttgtttgactttttgtattgatttgtaacaattctttatatattttctgcacgtcaatcctttgttatctgctgcagataccctccagtctgtgccattcatttgtttattttgtggctttggtgtacagaagttttttgttttcatgttgtcagatgtatccatctttttctttgtggtttgtgggttttgtgggggtgggtagtttttggattttgtcttatttaagaaatcttctgtaacccgaggtcatttatgcacacctgtattttcttcagaaagtttgaaagctgctctgctttttccatttgggttttaagtgagcttgagtttatttttatgtgttacctgaggtggcctttttctgtacgggtaacaaaccggagctgttggcatttattgtagtcccttctttcaaaagctcccaaataacgtggggctgtgtctaggctgtttctttcctcttgggccagctgtagggtttgcctttccttgtctgtctgcacctgcactgccgccatattgtttccattgttactgctttgtaagtcataatggcaggtgggacaagtcattcctccccctccttcttcagagtggtcttggctattctttacctcccccctttttattatgtcactgttcgtgttgatcatattaccaactttcagatttttctgttaaatcagcattgaaaatttacctcacagcctgcgtcaggacttccttagagtcctaattctcctttctgtccccgttaccctccggtcccctgtacctgttcccttggttgccctgcttcaggtgtcggctacctcaggctgcattcctacatcagcccccatacctccacacccccgcatcatcccacaatatcccagacttactttccggaagcaacggcctggtctcggactctagcagtgatttctagttgcttctcagggccacaggtcttgcctaggagcaccctggggagtcatttgacagctcacccagcttcttttggtgcccgagggcatatctggaggccatagggaagccctggaaaagactgggcacaagctgaagccaaagttgggtgcctggctggcattggtagatttggggtcctggtttgcattgctcacgatgcagaatggttgctgacctttcctccagcgttggggatgatgtgagagtccagcaggcccccttcatgtgggccctaacttggggaaatctccaccgtgagcaccgggaagtggatggtggggccagcataagcagtatcccgaggactgatcatggaggaccattaggaagggggtcttaaggatgaccttggccagaccgtgggaagcctccagagagtgttacccagatccagggtacagtgttgcatttccaaatgagatggcagttccttcgttccttgatattgtcggagaaggatgtttaccaaacagaaggtccctgtctcagggtcttcctctgaatggtttcctccagtgagtcacttcagcatcctctcccccaacccgattccctttcaagcagcccaccctacttgtaatccacatgtcttgaatgaatttttgcatatcattttcttctatcttccttcaccaaatgatgtctcccttcttcacagcgatgctcagaactctttccatccacataacttacctggtttctctttctcagccccacccctctgtctgcttgcctgtgacaccactgtgcagagctgcccctctttctgtttgtttatacttatgtgtattgcttttctcgtgaatcttcccagggcttgttcatgtctgtttagcctgtcattcctcattatgttgtttctcaaggacaaggattatatctccctcgccctttgactcttcctggtacaggccagtgcttagcacattaggtcgtagaacagaaagtaggattggccgggttcagtttgaggtttatcacttgctgtgtgatcttgaacaagttacataacctttctgggcttcagtttttataaaatgaggatgataatggtactttcctcatagggttattgatttggcagagtatcttggatatggtaagcacccataatctgcctatcagtgttattgttagtagttaagatattagaaaccatgccaaaacgtgggacctaaagtgccacatacaaattttacagttcagtgatgctgtcgatttaaatcagttacatgttggcatcagaaaaattgtctttcctgactgaagcgctgttgattactcctgtctcactcatttcctccctcttcctttgataggcaggtccacgagatccagtcttgcatgggacgcctggagacggcagacaagcagtctgtgcacagtgagtaattaactgtggagaccagagtcctttctctgatgacagggtgctaatgggctgggcttcctgactgcactctgccttgggggcttaatgattcagcgtggaatgagttttgttgttagggtggacagaaaaaccctatggcaaagtcactgatttccctgagtgtgccctttggaatcccacaagtcttatcccccattacccctccactcaacctgacatggccctatgggaatggaagcgcttgcctccatctatcttaatctaattacctagtccttagaggaatgtactccataaaaattcagagatgtttaactggaattggccatttcttctgagctgagaactgtggctttttaggaggattattcagaaacgaacagcaatattaattagtttagttcccacagcatggtttcttttgagaagcatgctggttttttgttttttttcattttttttttttttttctattctgaggaaaggtcctttttctgagttggtcatatggacaccacctgcgggggctgcctacccaccccactgctgggctccctcaggacccattcctcctgttctctcatgtctcctttcgcagcttcaaaagcagctctgttcttggttctgtgccccaccttgttctaatctcaactgtctttgttcactgtgggcacaaagggctaggaaggggcagtgtcactgctgtcacttctttatggggcaagaagcagtctggatgctttcttttgtgcacagtttagcttctttgttcatcggactttgtttgccttctcagcaatctcattgttacatgattagaaatggaaagaggtcattttgactgtcttatcgaaagggatagggaaaatgaccgtatttatcgtatctctttacctctgtggattctttcctgggcctttcctattgatatttggtttattttggggacgtcaacattgctcagcccacccattcttacagaaagctttaagggaagaaagccttaagggaactcttctctgtatgtttcacatactaatcttccccttcctttatgcttttttttttttaaataaaaaaaaaaaaactcattactatagggaattcaattggcagcctttttctaggtatttataatccacgtctgagaatcccaaaggaaaagagacctatatcagaaaatttagcttaaagtatttatttggacaacctttgcatgtttattttctaaaggtaggaaatttatttctacagatttaccttcagcttttttaaaaaattggcattgttatgtcattaacagctatatacatgtacttttttcaaaacaacatttacggcctaacttgaattttttctgttattcattagtgtatacatttttctccttttgaaatatgtagttctagtttattggatattgaaaaaaaaatctgtgatttatcattgtaatttaagttcactatctcttttccagcaattattcttttttcttttttgtacagtagtagaaaacgaaatccaagcaagcatagaccagatattcagccgtctagaacgtctggagattttgtccagcaaggagccccctaacaaaaggcaaaatgccagactgtaagtgctgacctctgacatggctctgatactccaggcccatcaagacaggcttttctccctgggggaggtgatagaatattctgaaaaccaacgtacatgttgaaaaactatgactatgcaaagaaaaagccccctcaaagggcacaattctatctgagtgatgccgctcaaaataaatagcctgtgaggtttgtgactcagaaaccttgtgaccccttacctctttggtgtcattttgaaattttgcctccagttctgttttttgactagatccatagccacctgaagcctaatgttgccatggagttttgttctgctctttggttcctgctgggttcttcttgggttgaaatgaaaaatcacttcaatcagtccacccataatgaaatgctgatctaatgtttgatactccagcatgaaattaaaatgaaaccacccttgccacctccacccccagcgcctgtttccaaaagttttatgaaactttgtggatgctttacctcaaagatgcccttgggcttcttccaggagagccatataatccatagaaggtcaagaagaggtcagtgagcctgcttcctgtcccctgttctctgtcatgcatccagaatcagagcaacagattctgaagtcaagctgctggaatcttgtgtgctaccatctcactttaaccacaagtttcttcttgactttcaacatcgttgatcaaaattagatcttgtggtgagggggtatagtgtggggtggtgtagggagaagtaaggaaacgccgtctttcctcagtacaaagcctggccccctcagattctgctgccctgagttcctggaatttaatctctctctccatcaattccagtcgggttgaccagttaaagtatgatgtccagcacctgcagactgcgctcagaaacttccagcatcggcgccatgcaagggagcagcaggagagacagcgagaagagcttctgtctcgaaccttcaccactaacgtaagccaggcccgtggtgagggtcggcctgcacttgacagatcgtgggggctggagttcagatctctgagcgccatctgttttgggggtgtctgaagaagactgatgatgaggaaaccaactggaaatgacaggaactttgtgcattgccacagagactagacctagacagagaatccctttttctaagacaaaaacctgaagaggaagcagttaaattgaaggggaataggcagaggtgaaaattacctggttgggctggtctgagacagaaaggtggaagttcacatggtggaaacgtttttctgatcagatagagacagatgattagaacttaggccatttgtagagaaggcagcatttcaaagctgcctgcgggcagttgccattgtgccgagtatgtgtgtggctccagtgtcaggtgcattaagatgtttttgcccctagtctgagcagcaatttggaggaatttgttaacagatgtttagggttagatggactgcttgcctgagtctgtctgaaagtgtgttggtttgcatgtttgatttttcagaacccattgtccctgccctttagtcttaaccagatcatttcctgcacatggctgtagaacatactggccttttctgtgtcctgcataatatattccactaaatgaagtgtgctttggctttttgtattttgtttttttacagaggattattttctaaagagatgttagctttctaagccagttgttaaaattcacatcatttcctgctttgtagatgtttaaccctcaatgctgcatccttgctttgcaataaattttcccaagtgtttcaggctgtgccaacatagtttttgcttccccagactaagcagtcaagttacagtgtttaacagttcaaaaatttaatgaactataagacacactaaaagatgtttggattttagatcgttataatgtagtattcaggccttttttaggccaaggatgatcgcttgggattattttgttttttgccagcctggcgtgatgctgtgcacaccgtcagttcttaataaacattgacttgccagatgaaacttcttcctggtcattctaccatatggagctataatacatttttctgagagataatggcccatcagccatactgttttagatgggagggtaagaaagatttgtatgtgaatggcatttcataagtgctagtcaaattactgaagagaagtctctgagtctttcaaacgccagcatcttctgacacactgggcattagctgcatgcagaaaactagttaattcaggcactaggagtaaagcacatgatgaaattaaaagacctgacgcctatctgtgaggagctcccctgttagcaggggcagttgaaaacacgtatgtgcaaaatgattccaaatctgagcagcaaagaaacagtggcataaccttttttttttttttggacaattgaaactggaatttaggtggtaaaaacagcactagtggagcagggcacaatgacacacgcctgtgatcccagcactttgggagaccaaggcagtggattgttcaggagttcaccatcctgggtgacatggtgagacattgtctctacaaaaaaatataaaaattagccgggcgtggtggcgtgagcctgtggtcccaactactctctggagcctgaggtgagaagatcacttaagcctggtaggtcaaggctgctctctatcctgggtgacagagtgagagcctgtctcaaaaaaaaaaaaaacacgaaacaaaccccagcactacttggcaggagagcttgtgattggcagaaaagagaagggaacgctctcacagctggcgaggacttggctcctgcctatagtccactttcagagcaaaagtagagccaccaggatgggcgttggtgtttccctctacagtgtgggtaacagggcaggccctgcgctcagtacccacattcccagctccactggacttccagctctgtgatcactggacacacttccagctgtgtgatcttggacaagttattctacctctctgggcattttttcatctataaaatggggaggcctgtggacagattccttgagcacaggagttggagaccagcctgagcaacatggtgaaaccctgtctctaccaaaaatacaaaaaagagaaagaaagaaagaaaaaagctgggcatggtagcatgcacctatggtcccagctactcagaaggctgaggtgggagaattgtttgagtccaggaggctaaggttgcagtgagctgagatcgcgccactgcactccaccctgggtgacagagggaaaccctgtctcaaaaaaaaagaaaatgcagaagcacagcctcctctatccttagttaactctcagtctacttggagaggtaaactatagataaaatagctaaaggacacgagcaaacatttaacactgcattaaggggaagccatggaaaggaacatttggaaccagctaggttagtgagtagtcagagaaagcctttaggagacacccaatgaggtcttgaaggaatagcttttcctaagaggagatcatgatacagagacaagtatcgttggaatgaacgatacttgtggagtggaactcatttggagagtgacagatctgaggaagttcctcttctgtgtggacagaggccaccccaggcctttgctttgctttttcttatccattagggtccgctgattctttcaccagcccctccggctgttctggcttggccttggccaaaagacagagcagtgagaccccaggaactgactgataagcaaagttaatcaagtgcctgtgtttctttcacaggactctgacaccaccataccaatggacgaatcactgcagtttaactcctccctccagaaagttcacaacggcatggatgacctcattttagatgggcacaatattttagatggactgaggacccagagactgaccttgaaggtggggtccctgctgggggacagagagaaggcctcttgttttagcctcatccaacagtttagtaactgtgtttatattttgattacgtgtcctcaaattgtgatattttgatgacaagacagagcccttgagtttgggatcctttctgttggagttgagttattgtgagcctgaaagtacccagttcctttgccagtgcttgaaacaaaccatgaagtggcctctcttaggatccaggtcttttcccatttactgaacttatcatgaaagtgagtgctactacgaggggtccaatcacaggctgagaaattgtgttacagaatctactcttggaagaatgaagacgtggctgtcctttggtacctcgctttaaggtggctttcccttaggacccctactgtggactgccttataactaaaaccttttgtattttagtaactgaatccccactgtgcagtgttagggctgcctggttgtttgcagtagattagagctttagaagcttctagagcttctaaagcccgtgctggtgatcccagcgactcttcactccctagccttaggtattcctagaagccctgaccagttggcactgctgagactccagcccctgggagtggtttacagaaacattacacagactctgatgtcagtcatgatgtttcagcctctgcccttttcctgtatcaaccctgatggataatagggcgtgggttctgtctgttatcagggtgtggtcccctgtgaatgaagcactcccagccactgagctgtgagaaacagtcactcggaagtgtgagctttatcttagtttttgttggatcatgttgagtctgtcagctccacaggacttcagtacgtttctgaacagtccctgccatctctacgggggagagggtcaggcaagctgcaagtgacactcacctcctgctgacagttgcagtgtctcagatggcctggaagggtggtctccagcagcctgctgggcgctcccctttcatgagagccacctgcagtgacctgaactgatacatgttgattagtctgccctttctttagaaaactgctactctccttttcatatctcagaaaaacagtagaggccttttaggaccaaactccatgtcacactgatgaagagccagtgggggttagagcgtcctgttaaggcacatgctaacttcccactcaagtctggcagcgctggggcatcagcacacctcttgccacccacactgataccagaggggaaggctgtgaggtggctgggggttgagacttgaggtttctaactttcctctgcacacctgtggctacctggtgtttgtctcttgattccctccacctgcctcacaccctgcctccgtcgggattttccacctacaccattcaaaaggaacataggagagggcatgaaggggctaggctgaagcactctgatgactggggccaatttgtggctgaaaatgaatacattttttgaaatttatggtcattttcaagtgatttagaaggttgatccttagcctcatacagtgatgaaataatctgtgtgttcagagccaagcaggactttagcaagagtctgattgtattgtcactatctcggggaaaaaaaaatacaaatacatttctctgatctctgatggcaatgaagtttgacttgtaatttctctggctgaggcttcttaattgctttctgggcagaatgtagattttggattcctgtccatgatgcctaatgttgatctcactttccttgtttctctcagttgctcattaatgtgtatttattaaaaaaaaaaaaaaaggatatggggcatgaggttagatgccatgcatataagttgcagtgggtgatatgtgctgagtgacttggggtctgccccggcattcacttatacttgtttcttactaagaaattgaatgtgctttaagctgaaaattagaaagcagtagggaaggacaggctggatggtttgggttgttggtttaggaataaaatgcccttttgttttggtggtgggtgatgccatctatagaagggttttaggtcattgtgttggtgtctttccgtctttcccacttgagaccctcttgtaaatatggacttgacccacccattgtactcagaagaaacctcaaagattgtactctacaaagtaaataggttggtatcaatgattattggaactagagagccgaggacaagttttttgatgttgccttctttttatagtataaaatattctaattttaagtatttttgttgagatataatttacagacagtaaggtatacagatcatatttttacaattcagtgaatttgggcaattgtatcagcctttgtaactcacactcccatcaaggcccggaccatttcacctctgaaagatccctcgtaccccttcccagtcagttgacccctctgccccaggcagccactgttgtgatttatttcaccatagatgaggttttcttgttattgaacttcatataaaggtattcatgctactcttttctatgtggcttcttcctcccagtatgtttccaaggttcattcatattgttacctatttaattccatgttggtagtcaggtactttttattgcaaagcagtattccattggtacaggtttaccatagtttgttcattcatcttgtgattagtgacaccattgttttcagtatgtatttatttatgtattttttgagacagggcctccttctgccacccaggctggagtgcagtggtgtgatcttggcttactgcagcctcgaactcctgggctcaagtggttctgtcaccttagcctcgcaagtagctagaaccacaggtgcacaccaccacacctggctaatttttttttgtagagaaggggtcttcactacgtgcccaggctgatctcgaaatcctggcctcaagtaatcctcccacccacccctcccagagtgctgggattacagggatgagtccctgcgcctggcctgtttgcagtttttagatattctcctgtgtttttttctagaagctttaattgtggctttagcttttatgtttaattctatgaaccatctcaaattaatttttatgtataatgtgaattgaggttcaatttttacacacatatctgtaagagagatacatatatataaaatacatacctgtgatattatatagtcagtcgttccagcaccatttgtggaaaagacttttctttccacttagcgttgctctggtaccttgatcaaaaatcagtcgacgacatgagagtggctctatttctggctgatattgctttctgtgtattctgggcatgaccaagagaatgtctgttggcaaagctccatctcctgatgccattcacccactcttggtaaagcgacttgatgtttgtttttttttctgttctcttctgccccaggggactcagaagaagatccttgacattgccaacatgctgggcttgtccaacacagtgatgcggctcatcgagaagcgggctttccaggacaagtactttatgataggtgggatgctgctgacctgtgtggtcatgttcctcgtggtgcagtacctgacatgagccagccacgctcagtggctgaacagcattcccacagcctgcaagtgtgtgtgtgtgtgaaagagagaggggggcccagaggccgccttttgaaatgtttgcctgtctgaactgtgaagacacttgggagtgattgtggtctaatttccaacctgctctgttttctgtgacatcttggagggggagctagtgccaccaccatgcgcggtgcttaggaaatgaaagaagtcccgggtctgtctctctcactctcgctctcactgggggagggaaagaatggctttggtggctttgttcacatagctgatgcgtgccctgggaaggtgtccacagtgagccctgtgtgcaggactgtccacacggttcacaccttgtcaccatcaggcctttctggctcctgatagggtggagcaaaagtggaaaggaaaggaaagaggccttttctcacagccattatattaaatagtaggtcgattcacatcctcgtgctcctggccaccctcccctgtgcctcagtgacatgtagatgactgactgccaatacttgtcaccattccctggaagcagctacctaggggaaacaagatgtagtgctattgccgataacaagtaagattttccacactacagctgggtgtttctcttttctaaagtgaggccagtgttatttcccgggagtgttcagtcttgaccctagtcactgattttttctagttgttaatagagtggttggcttttaaggttcagagactgtggcttggcacctgcgcccaggctttgtgggcctttgccccttagaaagtagctgtaggcaaagatttgtgattttccaattacagtctcagctctagttttagtatctctaattctttggttcccttctcttccctgaaatatattagcacctgccagccaggccctcattttgcccagccagtgtgggcagatcccaccgtggagacatctgtagtgtgtatgtccttgtaacactctgttttcagggactacaacctttttccttctgtgaccagccccggattcaggctgtactaataccaggtatattgtggaatttagtataaaggccaatctgtcctgaagtccatctaatgtggtgaatcactgaaagtctcagaaagacctggttagtgtatgttctcatttaccacaggcctaccagccctgggcacagcagcttcatggcaagacataaaatgacactcaaaatccttcagatctggaaaccggctcagtattaaccctacctttggttgtcctgccctacctgctctgttagtttcttgttgcttgaactgtcttctgtcttatttcccttcctttctgtgttcctcttcacctctcttgttcccctccccgctgctctgtagtcatgttggtcctttcaggcacctctgtggcatagctcccctttggtaagttttcttaattgtcatagattaactgagtttcctggatgctaatttcacactttcggttggaggagatctccattgttcctacccctccgggccaaatgggccccaggtttccaaggaaggagcaatctgtgactcctaaaatgggttggggccctgccagagttaaagcagtgactggagggtggactggggggttgcagcatctttagacctagatctgtctaactctggggaggcacattgacatttccattacacacagcactgctgcggtgccagggacctagcgcaggacttttggtaatccataaaatggattctgagactgcgacggcaaggctgtcctgtcccccaggcacccaaggatcctgccagacagcacactttggaggaaggtctgcagggagcagctgagccatttgttcttgaactctgggaggcagaagtccccgcacccatcatgcgtggactgataggacatcttttcgtggtgtgcaccagtgctttccacacttgacagtggttggctttgatgaaccctcatgctgcaccttcagagccagtcctctagtttggaataaaaattgcagaggtggtttttgggtctttaccacctgcggctggtggacagcagccagtgtgtctggacacccaggggcattgagactgcatgttgtcacatgaccacttctcttcacacatctgctttcagtgcctggtgaaaaatagaccttggcctaacagtgtgactctctccaccgcctcagtgtagggaagggtccaggccagggaaggagcaccctctagtggaggcgggggtgaattcttaggtcgagctgatgcaagaaactccggtagccagcctctgtgaccttgtacatgagtttggtgtgcctattgtgatttaaaacaggtgggttatcaagaggaacttgagatctctttattacatggacatttacttcagggggaccactgtaagaaaagccaaactccaagaccaagtaagttagaggagtcttgattttttagacttcactgcggagttctgtacaccctttgccctgatgaatttgaatgggtttgatttgcaaatttggatttacacccattgttttggaagcacatcagctgaataaagttgaggtttattttatttagaaaatcacattttgtaaaagaattcgatattcatttttataactaatggccccctttttttatgtttctaggccagagattctcaaacactgctccatggccaggggctgggctggctgcttcagaagcagtggggaagctttttaaaattacatattcctggggcctaccccagatctgaattagaaccttttttaaatctctaaggtgattttattttattttttatttttgagacagtctcgctctgtcacccaggctggagtgcagtggcgcaatcttggctcactgcatcctctgcctcctgggttcaggtgatcctcatacctcagcctcctgagtagctggaactacaagtgtgtgccaccatgtctggctaattttttttttttttttgtattttttagtagagacagggttttactatgttgaccagattggtcttaaactcctggcctcaagtgatctgcctgcttcggcctcccaaagttctagggttacaggtgttagccactgtacctggcctctaaggtgattctgatgtgtgtattttggaaccactgtctcctagacagaaagcttctgtctcaaagatgatcacattggtgtaaagagcaaaacttgttaagtccaaaataaattcttactgtttatatcctaccttagtccaaaaaagatttgaggagactttgaggaaataactgaaacagatacaaagaagtgaggcacaagaacaaatcaagtcagtgtagaatgtcgacatcaggacaaggaactcaaacgttgtaacaccctaagaaatgtttggggaaccctaatttgactttcagctccagtagccaaagcaaagaaagaaacgtcatctgttactgtctcaaccggggggtgacattttctcaagggaaagcctaggcccttcataaacagcttgcctgtaggcctcacggaggtcagacagggattttcctggctccatccctgccaatctgaaaccctctcacttatgttctccatcatttatcctcattatgcagacaaggggctgagctgtggtgactgtgaaggcctcacaggagtccgagaggagctggcccctcatccagcttggaaccatgggcccacttaatctcccacacttctcgtggggtgctctgctggggtctggggggattgagaggtgtgcaggggactgagatggtgcagcctgctggcatggactatagagctataaggtgtttgctgcagacccttcagatagtatagggcaagttccctgttgggaaataatttcctaactggaaggggagggaatctgaagtgaaagctgtcctcaggccttgcccctagggggcggcatagccctatctgtggctagtgggccctgaacacactgccttaggcctgctgtacttagaagctgagaaaggaaagtgtcattccttccccattttctgtgtccttttcatttcatatggaaggcacatgggagaggagtgttcaggggtgctgggcccccaagtgctgttggtaagttccccaccatggagcctctgtgagccatccctccccgcctcatccccatgtccctctagtacagggttcccaaccttggctctgcattggaattccctcgggagctttaaaaacccatgtgtgggtcttccattcaccctcttattaattggcctggagtgcagccggggcattgggagttgcccaaggcgattgtaatgcccaggggtagggagccgatggctctaatacaagaacatcaacccaaggctagcccgtcccccatgcacttcccctggccgcaccgtgggaaccacttgcagagaccaactaggggcagggatggaagcctgattctccctctggatcagaaggagccagatcccttgtggccattgggtgcccctcattaactgacacctctctgctgagtaaagcaccttgatgtgacaggccagctcttcgctgcccctgcagtgcagcccccagccctccccaccacccctgcctggtgttccgtcctccctggactgcttggtcttctcagaacatgccacacactcagtacagctgcacctttgcacaagatgtttcctctcagatgtgccacaaacacccccacaatcccatgaaacctccaagaagcctgcccctcccctccaaacaacctcatactgcacgcttcctgcggaatgggagttgctcctcaccgcaggggcctttgtgcatcccgggcacgtagtaggcgcaggcgccatcgggtaagcggctgcaggagagcacttgagcccatcccccatgcagggccagcaaagctgttgcagccaggccaggaggaagccagaaggttcaaggccactgatgctacgagccatgtgctcacagggcctcaacaacagcaatgactgcagtaaaagaggagaggcatggggccccgtgagggaaactgtcactcaggactggggagagagaagtagagtgaccaacttgtctgggttttaaagctgaaagtcctgaatcctggcgatccctcggtctgatggtcaccctagataagctaaaggctaggacaggcgtgactaatgcagggtatctaggaagagggggctctcggaggctgactcctggcttagcaattccattagtgtggttccactggcccttccttccaggcatctgtgacatggtggctcctggagagctggcagaggctgggccaggcccaggagggaagtattccaacctcctcagaagacagtggctgacagtacaagaggggacattcatctttattccgtcttccagagccctggcatgtgtccagtgccagtgttagctgtttcagggcagagggaaggagttggagacaagcagccctccgcagtttgcactggttacagcggccggaggctgtggtaagagcgctgagcccaggatgcagagcctggcttcaagtcccagccctgctggcagcaaccacgggccacacacctctcagcctcagctttctaagaatgggggtaacacctgtcccacgtccctttctggggtggacatgaggcccgagtcacgtagtgcttttggcagattccagaggtctgaggcagtgaccctcagcctgggctgcttcctggagtcccccagagagtttggaagtcccgattctgggcctcgctccccagagatgccgagctacctggtctacagtggggcctgggcttcagaatttttaattttcttttttttttttttcctctcattctgttgcccaggctggggtgcaatggtgcaatctcggctcactgcagcctctgcctcctgggttcaagcgattctcctgtttcagcctccggagtggctaggattacaggcacccactaccacgcccggctaatttttgtatttttagtagaaacggggtttctccatgttgggcaggctggtctcgaactcctgacttcaggtgatccacccacctcggcctcccaaagtgctgggattactggcataagccaccgcagccggccttaatttttaactttctaaggagtctcctgtgaggtcgagattgagaaccacggctgtcagtgcatcccaggtgcaatggagtatcattcctgttcagctggaaagacaggatctactcgtgaaacaaccgaggttgagaggtgatagtttagtgcggccattgtggtgggggcattaaccaggaagagctttctgtgagagggcgaggtgatgggtgtgtgaaggacaggagatgatgtgggagcagtcgaggggcaggagtggcctgggggagggaggaagctctaaccagccctggctgctgtgggctctgaggcctgatgtgctgtcttctgcacgacatcctccacgcactgtcctccgtgttccagctgggaaacttgctgctcagaggcctgagttcatgctgctgagatgctactgagagctggagaagctgtcaggctggtgtgggtgtggacaagccctactgtcctaggaagacctgcccatgatcttttgaggtgcaacgtagtgtgatgggggtggtgggatagtgtttgagatggggttggcagacatggcgtagaatcctgactttgctgtttattagcagcctaaccttgggcttaatcactccagcctcagtttcctgtctgtattcagctcaaaacagaattgcatctttgctgggtggtaactcatcagagaggaacaggcgtgggctatgcagaagggaagcagttctcccttctttccagcccgagcaacaggatccacattctttcaaccaagaccacttggccctgctcacctcctggcaacttctggcctcctctaagagtttcttgtgccccaggcatgtgcagggactgaggcagaagctcagggagtggggacctctataggaggggagaataatcactgctgcccccaggacctcaccaggtggttgtgaatgtcaaaaggtaaaaccctggagataaacccctgatcgctgccgggtgctgtccaaattattgttgctatgtgcatggagtgggtataaattccgtgtccatggtgatttcttccaggaaaccatttcttttttccccctgtggcaaagggcagcctctcttacctcaatccaggggccctgggagacccttggaaggcggggcctccagggctgaattccagaacagcagctgtggccacctccttaggccacctgggaatcaattctctgtcgtcactcacttggaggaaaccacatttaaattaaaaatgtaggctgggcgcggtgtctcatgcctgtaatcccagcactttgggaggccgaggtgggcagatctcctgaggtcaggagttcgagaccagcctgaccaacatggagaaaccctgtctctactaaaaataccaaaaaaaaaaaaaaaaaaaagaaaagaaaaatgccaggagtggtggcgcatgcctgtaatcccagctgctcgggaggctgaggcaggagaattgcttgaacctgggaggcggaggttgcagtgagccgagatcacgccattgcactccagcctaggcaagaagagcaaaactccgtctcaaaaaaaaaaaaaaaaaagtaggtggcctgggatattccctttgtggaaaaaaaaaaaagaaatagctcaagctcagtattgcagcccttaaacagaaaagtaattaataattatgagaggccaggcatggtggctcccacctttaatcccagcactttgggaggccaaagcaggtggattatctgaggccaggagttcgagaccagcctggccaacatggtgaaaccccgtctctactaaatatacaaaaactagccaggcaagttggtgtgcgcctgtagtcccagctacttgggaggctgagacatgagaattgtttgaacccaggaggcagaggttgcagtgagccgacattgtgccactgcactctagcctgggtgacgaaatgagactctgtttcaattttaaaaaaacaaaaattatgagatgtcgcggggcagcagtcaagtgccaagcaagtggggtagatatcagagggtggagagcccacccagcagtgagaggaggctgcaactgactgctgcccctggggaaggtgggacgggggccagattcacaggggagccatgtgagcttggttctcagcaggctgggtttggagtggattgtggaaagagtagggacgtattagggtgaagctggaggtgggtgtggaggaaggccaggggaccctgacatgaatgtggatgcaggaaccctcagctgtctctgaaaccaggagggctggggaaggaccctgtgcatgtcctagattctgtggccccaggagttactgctcaggaagcagggcagcctcctctttggtgtatgtgtgcaagagagaggtcgtggtgggctgtgggttgttagtctctctcccaggagcacctggcaacctgaactacccctgctccctccccaccctgccccagatctggtgaaaccaccaaccaggcggaggcagggcagaggctgtcactgccacacaccttcagagctccctacaacttacgttcatgctgctgagatactgatgagagctggagaagctgtcaggctggtgtgggtgtggacaagccccactgtcctaggaagacctggacatgatctttttaggtgcagtgtaatgtgatgggggtggtgggatgatgtttgagatggggatggcagacatggcttagaatcctgactttgctgtttattagcagcctgaccttgggctaatcacccaaacctcagcgtcctgtctgtatagtgagaataataataactacctcaagtggtagcaaaagtgcctgtatttgagagcttgtccgtcactagaaatagtttttttttctttttgagatggagtttcactcttgttgcccaggctggagtgcaatggcacaatctcggctcaccgtaacctccgcctcccgggttcaagcgactctcctgcctcagcctcctgagtagctgggattacaggcatgtgccaccacgcctggctaatttttcgtgtttttactagagacagagtttcaccatgttggccaggctggtctcgatctcctgacctcaggtgatccacctgccttggccttcccaaagtgctgggattacagacgtgagccaccgcgcccagcctagaagtgatttttgtcaggagacagaagacctttagtgattggagtcaagcaggtggagtgtgaagatcagctctgccctttagctgtggaaccttgagcaagccacctcacctctccacgcctctgttctgtcaccttttggagatgaataatgcccatctcacagggcagctgtggccagtgcatactgccatgcctgtaaagtgcctactgcacagcccaggacatagaaagatggtaactgaggttttgttgtggttgttcactagcattgcataggacccaggtctgatcccttcattcagctggtgtgattgtgagtcaaggatctgatatccccaaagaaaggactgcaagtatttgccagtcagactttatttgttacaagatacgatattgcacatgtattcctgtgttcttcatcagaagacctgaattcaaatctccagttcattacctattaggacttgctcactccctctttctctcccagcctcagtgtcctcgtaggggaaatgggaatgctaataatggcctacttcacagaactgtggtgaagacaaagccaatcaagcatgtggatcagtgagtatgcgcagggctgcaagggccagaaatcccaggatcttactgctggggttagatactgatctaaggagcttaagtagtaagaactgtggatgtggggcagcctgcagagctggttgatttagggctcggtgacatcatcaaggctgggcttgggactgcctgggttccctgagaggcgtggaaccatggtgggaagatgtaggaaagatgaggatgatgattgacagatcagtctggaattgttgcctgctaaagttcattcatccattctttcgatagctacgaactgagcacccaccaggtgccagtcacgggactgggccttggagaacagacgtgacccacctgcattgtgatccactgctgtgtaacaaatcaccacaaaacataggggctgacggcaatagctctcagttgctacacctcacagcctctgagcataagaactggggaccaggcgtggctgggatagctgtctctgctcagcgatgtctggggcctcagatggaagatttgaaggctgggaggagaatcatctgaaggttcactgatgtggctggcacacagtgtcgctgggcacacaatgtcgctgagccctggactggggctatcctctggaacacctgcacacggcttctccatgggaccagggcttcctcagggcatgatgactgagttccaagagtgagtatcccaagggagagagcaggtgggatctgtgtactttctatgaccaagcctcggaagtcatagggcctctgttctgccatactcctttggccgtggtgatcacaagccatatggtcacaagcccccagctgcctctcagtgggaagaatgtgggtcacattctaagaagagcaggtgggatggaattgacacggtgggtggccatctttggagagtacaatctgccacactccccttgaatgatgctcacgtctagctgggaagacatacatgagcatgcagcaataaagtgcacaaaccgtcacacaggtacaaggtgcttagggccatggcagaagtagtatctacttaccctggaaccctggaggaggcttttgagctgaatctcagatgagtcagactggagcaggtggagcctgggcggacggtctcagcagagggagtcatctagcaaaggggtgtgctctgggaagggcaggaggattctgtggctggagctcaggcttcaggttcagtgtggaggagggaagaaaggctgcagaggtaagttgaggccagacgcggggtgcctaagagcagactcattagtccctgccctcctccagtccctggtcctctgcacacagtaggcacttcataaatattgattgaaattggagtgagcagtgtgtgttgaagaggaaaccaaatcccaaagagaggccgtggggcctcctggagggagcatgggataaagacagggagaacccactttcatatcataggaacttgagattctctttctcagttgttgcctttccagtatttttcaatgtctctgcaagagttcacgggggctgagagcagcccctgagtcacttctcgttcctatccctcacccccagctggattcttgggtcttcttccctccatactggtccccagagagtgtggactctctgcctcttgtaggtgaggaggaggcggctggctgaggaggtggcagaggcaagtgaaagggccaggagggtgaggatggagagaaggggagggaaaagaaggagatggagggggagaagatgaagttgctaagtgtatgatcagtgccagagccaaaagcccatactacaaattgctttttccttcacacttgtcccagggaaaggcccaattaaaatagcacctattggaaatggaagggtaattggaccaggcagcttattaggcccatctccaagagcattcaggggcagccatgagcttcaggaatttccaccatgtgaacttagcgggggagatgaccccgagcagcaagggctgacaggatggggctgccccaccatcctgcctgcccggggccctgctcagtggcttgagagggcagggactggtctgtgtgggggcactcttctgtggtggggtagttcagtgggctgagacatggggctgatgagatcaaaactgtccagttccaaatcccagaacagaggaaaagcggggccagaagtggtcttggggaccaccaagccagactttctgggggagaatgacttgccaagggtgacccagtcggtgatgagagatctggagtcagagggggaagtcaccgactcccaatccagtgctgctgcccagggacagtctcaccatgccacgctgtcctaaactagcctgtggccctcgccccaactacacgcccatggcctgtcactgtaccatgttcatgccaggcacagctaagtcagggtggcaggagccacgccaaaggcttctccagcttgagggcatcatctctccacacccctcagttattgacagaaactggcacacgcactgccagaccacgctgtccctaggaggaggcagacagaggtggacgcagcccacaggcttggctggaacggcgggttccagaggtgcccgctggccgcccacagtgaagtctggtaggggtggcactctccccacaggttacccattggaccagagctcatccacccagagcccatttccatgacaacagcaagctccttacccatcaatttcatccttaaagattcccaccccagctttctgagcctgggctcctcgcccagctgccgcgccagcccacgtctccagatcacaggtttagcagtgacttgtcaagctgccagagagagcctcctgggaggtgccttttaactggcgtagcccttgaaaacgaccatataatcacctgctaattggattaggaacttgttcccagggactttcttttgcccccatgttgaggccaccctactccattcttccggaacttagcattggagagcttccccgttcccctctgcacaacctcccaggccagggtaatgctgacagggttgccccaaagtcagatagtgacacaagaggaaaaggaaacctctaattttctggggcccaggtacactcagagaggaaaaatggcccagggtgggagaacacacagggccctctcttcccccactctgcccgcctttcagccttgcaagaaaatctggcttttccctcggggtgtttgcctcgctgcttctcccccccagacatcacctccctcacagcccagctccatgttcacccccaccaggaagtcttcctttctaaaccgtttttctctgcatcctctcagagtggctatatttggttcctgcaatataacttcgtatatattgcatcagggagagggggagattcctgaagctgggttgttattttttgtgaagctatttttttggtgcattttctttctattccagaaaattcttatagtgggtggatgtcatttatctacccagcatctcgtctttggactacaaatccttatccccttctgctggtgccattgtctctccttcctgtggaaaacctgtgccacgggactcagcgagggctgcctcctccagcagggtcagcgcctgaagcaggcctggtccatgcaggactgggtcagcagcccaaagcagtcggtttggggtgaccacatgactgcgcggtgggccgatcagaatcttccctggaattcccatagacactgctggtttcctgaccaacatccattcctcccctattctcactagctacacgccacttttgttgatctagcaagaagtccagttgaagatatttgtgcctctagactttcttgcaggtaggggtcaggtcacccaattctggtcaataagatatgggcagaagttgctgggagagacttctgggaaagggtttcaaaaggaacatggctcctttagtccactcttaactgatggctgagatggagacatcttaacctgaaggcttttattccagctatgtgagaggccacctgagaataaagtgatccgagaagaaagcaaaacagagagagagacagagaaagagatggcaatatcagttaagtccctggattgagccatgcctgaagcctcagaacttcccaatttggagagccaatcaataaatccttttcctacttaagctggtttgcactggatctccatctctttcagtgaaagacccctcagtgcaaacctccacaaaaccaaacccatgtctttccctgcctctgttctctcctcccaagataccccacataagatgctcgatgcaaagctggcacacaatattcattcaaatgactctgagccccccaaattctttttgtttttaaattttattattattttttatttttttattttattattattttacgtaagttttagggtacatgtacacaatgtgcaggtttgttacatatgtatacatgtgccatgttggtgtgctgcacccattaactcgtcatttagcattaggtatatctcctaatgctatccctccccactccccccaccccacaacagtctccggtgtgtgatgttccccttcctgtgtccatgtgttctcattgttcaattcccacctatgagtgagaacatgcagtgtttggttttttgtccttgcaatagtttgctgagaatgatggtttccagcttcatccatgtccctacaaagaatatgagctcatcattttttatggctgcatagtattccgtggtgtatatgtgccacattttcctaatccagtctatcattgttggacatttgggttggttccaggtctttgctattgtgaatagtgccgcaataaacatacgtgtgcatgtgtctttatagcagcatgatttataatcctttgggtatatacccagtaatgggatggctgggtcaaatggtatttctagttctagatccctgaggaatcgccacactgacttccacaatggttgaactagtttacagtcccgccaacagtgtaaaagtgttcctatttctctccagcagctgttgtttcctgactttttaatgatcgccattctaactggtgtgagatggtatctcattgtggttttgatttgcatttctctgatggccagtgatgatgagcattttttcatgtgtttcttggctgcataaatgtcttcttttgagaagtgtatgttcatatccttcgcccacttgttgatggggttgtttttttcttgtaaatttgtttgagttcattgtagattcttgatattagccctttgtcagatgagtagattgcaaaaattttctcccattctgtaggttgcctgttcacgctgatggtagtttcttttgctgtgcggaagctctttagtttgattagatcccatttgtcaattttggcttttgttgccatcgcttttggtgttttagacatgaagtccttgcccatgcctatgtcctgaatggtattgcctaggttttcttctagggtttttatggttttaggtctaacatgtaagtctttaatccatcttgaattaacttttgtataaggtgtaaggaagggatccagtttcagctttctacatatggctagccagttttctcagcaccatttattaaatagggaatccttttcccatttcttgtttttgtcaggtttgtcaaagatcagatagtagtagataagcggcattatttctgagggctctgttctgttccattggtctatatctctgtgttggtaccagtaccatgctgttttagttactgtagcgttgtagtatagtttgaaatcaggcagtgtgatgcctccagctttgttcttttggccttggcaatgcaggctcttttttggttccatatgaactttaaagtagttttttccaattctgtgaagaaagtcattggtagcttgatggggatgacattgaatctataaattaccttggtcagtatggccagtttcatgatattgattcttcctacccatgagcatggaatgttcttccatttgtttgtgtcctgttttatttcattgagcagtggtttgtagttctccttgaagacatccttcacatcccttgtaaattggattcctaggtattttattctctttgaagcaattgtgaatgggagttcactcatgatttggctgtctgttattggtgtataagaatgcttgtgatttttgcacattgattttgtatcctgagactttgctgaagttgcttatcagcttaaagagattttgggctgagacagtggggttttctagatatacaatcatgtcatctgcaaacagggacaatttgacttcctcttttcctaattgaataccctttatttccttctgcctgattgccctggccagaacttccaacactatgttgaataggagtggtgagagcgggcatccctgtcttgtgccagttttcaaagggaatgcttccagtttttgtccattcagtatgatattggctgtgggtttgtcatagatagctcttattattttgagatacgtcccatcaatacctaatttattgagagtttttagcatgaagggttgttgaattttgtcaaaggccttttctgcatctattgagataatcatgtggtttttgtctttggttctgtttatatgctggattacgtttattgattttcgtatgttgaaccagccttgcatcccagggatgaagcccacttgatcatggtggataagctttttgatgtgctgctggattcggtttgccagtattttattgaggatttttgcatcaatgttcatcaaggatattggtctaaaattctctttttttgttgtgtctctgccagagccccccaaattcttatctcaacaagagtcaaataaagacttgaaaagacttgacatctaaactacacttattaaggaaaaactcattaattccctatggagatctgaggccaagcacacctctgaagcagtgcatggcttggaatcctgtctgctcttcaccgaaccattccttctgcactcacctcctccagaaagccttccaaaccaggtcttaactccatcatcctaactaccttgtcagcactcacttttgttaacactttgattcagcagtacttgggttccatgagtatttgagcatagttgtgtgtgtgtctcatctctctcaccccaaacccactccaccccaccctaccctaccaactgactctcctgaactctctagagcaagagctgtgtctccatcagactagcaacttcctgagggcgaagactctaattccttatcccattgggatccagatgctgtctctcctcacatcagactgggaatggaaaatctttccatgccccatggagcctccttggcaagacaggaagatacggagtctgaaccccatagagatggagagtgggaggaagaaggtagccgggagcagttagcaggagggtccatcttaaccttcagggaaaaaccgattcacagcacataaagctagttctggatcagaatctgttattcaacaacacttgcaagggtttaactcagatcctgtcccctctggggtagaaatctctacccgcctaaggccaggattctgccttgccagtccttttttttttttttttttttttttttttttgagacagagtttcgcttttgttgcccaggctggagtgcaatgctgccatcttagctcactgcaacctccacctcccgggttcaagcgattctcctgcctcagcctcccgagtagctgggattacaggcatgcaccaccatgcctggctaaatttttttgtattttcttagtagaggcagggtttctgtctctactggttggccaggctagtctcaaactcctgacctcaggtgatccacccaccttggcctaccaaagtgctgggattacaggcgtgagccaccgcacccagcccttgccagtgtttcttatttctcttgtcccttgatgattgtgtaatgatgaatcccttcgttaggaagcttgtcaaatgcaagtagacgctgagggggcggccatgtgtctactgtctcgtggctcctgttggatgggagtagcctgcgtggctgccagtgctggctggagaggataccaccatctgctctcgtcagcatgctgccctgcctttgagtcccctcactcccgccccaagactaaatccttgaaagagcagctccacagcgagcatgtggcaagaaaggatgctaatggagggaagaaagtgatgaatccccaaaagagtcagggaaagccacacaagaaggaaaaatagctgcataaaggttgcgggggtgagctgggcgaggctgcccgctgacaggtgaatcaagactccagagagctgggtacggtggctcacacttgtagtcccagcactttgggaggcccaggcgggtggatcgtgtgaacccaggagttcaaaaccatcctgggtgacatggtgaaaccccgtctctacaaaaaatacaaaaattaggcacagtggcatgtgcctgtagtctcagctactttggaggctgaggtgggaggactgcttgagcccaggaggtggaggttgcagtgagctgagtttacatcactgtacaccagcctgggcaacagagtgagaccctgcctcaaaaagaaaacaaaaaaagaaacccaggctaagcgctgtggctcacgcctgtattcccagcaatttgggaggctgaggcaggtggatcacttgaggtcaggagtctgagaccagcctggccaacatggtgaaaccccatctctactaaaaatacaaaaactagccaggtgtggtggtgggtgcctgtagtcccagctacacaggaggctgaggcaggagaattgcttgaacctgggaggcagaggttgcagtgagctgagatcatgccactgcactccagcctaggtgacagagtgagacttggtctcaaaacaaacaaacaaacaaacaaacaaaacccagacagcaggaagcccaggtgaggagaaggggagaggcaaacaggacatgaaggaagatttgtttggtagagagaagggaattgatggcagccccaggatgcagtttgaacctgtatttggtagaagcagcgatggggaaatgggccagatatcggacaggagagagacatgatacaatcagtgctaatgatccagacatctccatggaggaggatgagcactcaggggaaacggaggcaaggcactcacccaggacgctgcagcagggatcagtgtgcctagcatggcaatggaagtgagagggagtcggagatctgactgagcgactcctaactttgagagttggtggctcattcccaccaaggggcttatggctgctgctttgggagtctttgctgccaaatgtcactggccgggggtcacctcacccgtaacccatggagagtgggtctcctctccccatttgtgcaggactttctttccattggcagcaactggccagggggcctcagaggagctgggaatggggagcaggctgccaagaaggtttggtcaggccaaccaacttggagggcagggaaagaagtggagccgtcaaccttcacattttacaggcatacaaatcacacaccaaataaggagaaatatgggacacatttgcacaataattcaagacaggatctccatggcaacaattacccaaaaatccactcctgacagttgcaacagcgggagctagcaaagaagactgggggtgggaaacgtgtgtgggggctcagagaatggcttccttttattctcgaactgaaggaagtgctgacggcaggaagcaaggtgtctcacagcctgactaagccaagagccactggaagtaggatctggaagaagccttagagacgtctgtgtgagctccttttgagctgcttagaggcctgggtgtgggataccacagtgagatgtgccagtgggatgtgccagctcaggggagggggccatcagggcatcgccctcccaccactccctctgatggacaagagttctccctagcctccagaggtcctcacaggggcacagtgagagatggagccaacttccggcgaagtcaaaggttctgggacatttaagtctgcctgaaaactgagtccagtccatagaaagctgacacatgacataggttaggagaacggagctctagcctgctctgctcccctcccagacttgctgtgtggcccctcagtttcctctacagtgaaatgtacaacctacctccaagaactattacaaggctgagtgaatagcatgagatgggaaatgcttttaccaaaatcactgccaatgcaaaaataagaggtttctgtgcagccatgaagagtggcctgagaaagatagctgcatgcaaggctgtccttaacaggcagaggagtttcctaggtcaggtgagagtcagtacaaagactgtggtgggaatctagaatgtggctaggcagcgatactgatgagatggtgggaagtaggaggttgggcgtagtggcagaagtgtcacctgtgtcctaccaccagacagatggacagactgactgtgagctcagagcaggcagtagagtgtgtaacctccaatttacaaacatttttaatcacacaccaaaaaggaaaagcattctgctttctttttggagtaacataaatccaaccccgttccccacccacatccttttaagtgtatttctttttgtctggtagtcctcaaaagccattggctatttttcagatcctagagctcagattgccttaaatcgcttgagaaaggagagttttttcatctttctttttggaactaagactttagagcaaaggaaaaggttcttctgggtttcatttgcatttggaagcccaggtttttgggaaaaaaacactctcaagagcttattactattataaatgtttagccatgtgatttttcctcaagagggcacccaaaacttttcataccaactcccatggatagcagtccccttatgctgaattatggtgggaaaggattaaggtaggacatttcttgagcatttttttcctattctgggctctctcctttgccatcccactctccactacaaaacttttcccttcccttttgtctcactaaccatggaaagtcctccaatccttggaggtcctcagaagccattcttcccaccactggagctgactttcttccctctcctggactgagcaggaagaccgattcatgagagagctcctctaaaggaattcaggctgggccctgagacaggacatcatggagtggactttggagtggccacaatagtccagatctggtcctcagcagtagagtccagaaacttggttgggccaggacatccaaaagttgtcagcctctcaggactgattcaggctaaccaaattcattgatgggcaaccagaatgccatttcctgaataatatatctaccaaaagactggtatccaaaatatggaaagagctctcaaagctcaacaataagaaaacaagcaacccaacttttaaaaagcaaaagacactttactaaagaagatatacagatggcacttaagaacatgaaaagatgctcaacatcatcattcaatagaagacaaattagacacacaatgaggtgtcactacacacttggcatacatacaaacaaacacaacacaaaatctgacaatatcaagtgctgacgaggacatagagcacctagaatgctcacacattgctggtggaaatgcaaaatggaacagccactatgaaaaacagtttggcagtgtcttacagagctaagcgtgtgcttcctatatgacccagcaatctcatttctaggtatttacccaagtgaaaggaaaacttttgttcacacatacataaaaaaactctacatgaggatttatttgcaatcaccaaaacaggatacaacccaaatatccttcaactgaagacagataaaaatttaaatttaaaaacctgtgatacatccatccaatggaatattactactaagcaagaaaaaggaacgaactactgaagtgtgaaacgatatggatgcattaagataagtgtgagaagccagatggaaaaggcagcttattgggtgattccatttatttgaaattcaggaaaagaaaaaccacagggacaaagaacagatcagtagttgtctgcattaagggaagaagagtttgtggatttggctacaaagtggcagcatgaaggagtatctcgattgtgttcatgatgacacaactctaagtatttgtcaaaatatatagtgctctacgtcaaaaaagtaaattttaccctaaatttgaaataaaaataaaaggcatttataatgactactttggggagagtttaaaaaaaacaaggtgggaataaaatactagacaaaaataacttggtagatgagagagataattagaatgtaaacatttaaagtcctgattttgccgaggataaaggtaaagatattgattaatttcagacttttggaacaaggatgcttttaaaaatggaagggtaaccactaaaaaaacagaaataatatgtataattttcaaactagtagagactatgaaagaagtaagagaagaaacaaatatctgtaattttagcactttgggaggctgaggcaggaggatctcttgaggcctagagttcgggactagccttggcaacatagtgagaccccatctctacaaaaaacaaaataactggaacatggtggtgtgcatctatcgtcccagctatttggaaggctgaggtgagaggattgcttaagctcaggagttcgaggctgcagtgagctatgatcacgccattgcactccagcctgggtgacaaattaagactctgcctctgttaaaaaaagaagcaaatgaaaagtgtagcaacagcaaatcagtaggtaagatgatagaaataatccaaatatattagtgatcacaataaatgaaaagatgaaatacgtctgtaaaaagattatattttttaaaaaaggtccagctgtatgatgtgtacctaaaatataacgacatagaaaatttgcaagcaatgagttgaagaagagatacacaaagaaactaaccaaaaataaagctagtatagaaatattaatatccaacaaaatgtacaccctttatctaatgcctactgtatgcagagccctgtctgaagcctgtgagatgacacaggagaaacagaaacatgactgctaccctaggggattatagttaggggctgaccaatgattccaaatcattttatttaatcaacaaatacttgttcaaaaactgtgcaaatccaaaaacatgatatttctaaaatgaggataagggagtggggcatagttggaattccaaaaataaaaataggggccaggcacagtggctcatgcctgtaatctcagcattttggccgaggcgggcagatcatgaagtcagaagctcgagaccagtctggccaacatggtgaaaccctgtctctactaaaaatacataaaaaattagccgggcgtgatggcatgcgcctgtaatcctagctactcaggaggctgaggcaggagaataatttgaacccgggaggtggaggttgcagtgagccgagattgcgccactgcactccaacctgggcaatagagtgagactccatctcaaaaaaaaaaaaaagtattgatcagtgtagtagttgattttcaaagatacccccaatgaaccatgcctcccagtgttcatgcccttgtttagtctcctcacacatcaaatctggactggccctgtgactcattttaataaacaggatgtggcagaagagaaagtatgctgattctgggccaattattgaggtctggaaactgcttttgcacttttgggaagaaagctgccatacatcaagtatagctatgctgctgtctagactgtgtggagaagccacatggaggaaatgccatgagttgataaggagaggaaagaggtccagccatctcagcagagcccagccttccagctgtccctgccaaggtgccagacactctagccagccaagtccttgaaggttgcagttcctgtcagtatcacgtgcagcaggactgagcagttgagcccagttaacctgcaggatcatgaaagataatgaagtggctaccataaaaccagaaatttctgggagtagttatgcagttatagataaccaaaagaatctctttcagtgtgtgctagaccctctgctaactcatcattttcatcaatgatgtgatttaatcctttcaaacatacttagaggtatgtataactaactcccattttataaatgaagaaactgaggcttggaaagaatgccacatggctaataaagaatagaagcagggcttgaatcaaggaagtcttgataagggacttcacactctcaaccactgcattatgtggccaagtgggagagctgagggatgaaaaacacaagacatttcacaataaatcatgatgtctatatgagcaccctttaagctttctattccttgtctttcttcatcctgtgctactgaccaggaaagtggattctataaagatgatcagttaagtaggcagatgacagccaggtgcagtggctcacgcctataatcccagcactttgggaggccaaggcgggtggatcacttgaggtcaagagtttgagaccagcctgaacaacatggtaaaatcccatctctactaaaaataaaaaaattagctgggtgtggtggtgggtgtctgtaatcccagctacttgggaggctgagttacaagaattgcttgaacctgggaggtggaggttacagtgagccaagatcacaccacgcactccagcctgggcgacagagtgaggctcggtctcaaaaaaaaaaaaaaaaataggcagatgatatagttggagattttattatagtttggacacacttcataacaagcactaatcatcctcagtgttcagttgtcacttgagaaaatgtaaatgctacatctgctcactgcctgtcttttcttccagacaaagaacatatgttcttgacaagggagtgtgccttgttccccacccacagtcaccactggagaagcttgagttttggagaggtggggactggctgaattctctttttttctctttttctcctttttgtttttaaagagaatagcatcttgctctgttgcccaggctggagtgcaatagcacaataagagctcactgcagtctcgaactcctggtctcaagtgatcctcctgcctcagcctcccaagtagctgagactacaggagcgtgccatcacacctgtgtaattgacttattttttgtagagggtctcactttgttgcccaggctgatctcaaactcctgacctcaagtgattctcccacctcagcctcccaaagtgccgggatgacaagtgtggctgagttggtatgggctctcctttccccatatccaaggcaagcttccaggattcttctgggacatcaggtgttagggaccatcttagtccctacctcagtttcacacatgagaaaattgaagtccacagaggaggtgtggcttcatcaaaaacccactgagaacgagtgttagaatcaggctaggacacattggactcctcctccagggctctctgacatccaaggccctttgaaatctctctccagctgcaaacagatttctagacttctgatggaggtgatctgagatgagcagcctctaaaagcagcctctgcgagcctctaagagcagccgggacctgctggagaacagaacatggcctaggagcgcaacagccaagtgttcagcaccacggacagcttcgctggcctattgctggggaggccagaggtggggaggctggttgtccagcaagacagagtgccatgggagagagaaaaaaacatgggaaagatctcagagaccatctagtccagcctcctcgatttggatgggaggagacccaggacaagagagaagtgacttgtccaaggtcacacaacaagtcagtagagagccagagatgggagctgacagcctacttcctcacacctcttcaaggccctcagatacctggtgtccatgacttattagtggcacagccagaccttgattaagggctccaaaattaaaattacctgtccttggaaatgacaagaaaagaaaaaaggagaaatcaaagaaatggaaagagcacccggccctgatgggaaggtctgtgatttggcctctaactgcaaggctttgacaggagcttcctactttccaaggtgatgtggcctttcagaaacaatttagttaccatggcaacctcattccaggtttcatctccatggcaattcactggagtttttcaccctccggtaagtacatgtgtgatggcccagacatgtatcccagaaacattaatataaaatcacatttttagaagtggagtatctcattatcctagtctgcagccagaggaataacaaggcatgttctcgggtgggcagggcccagggcatagtggaaggatgtctctgggggcagctctgccttctcactgcaattgcaaacctgtcccagtctttacagctagtgcatctcaacctcccatgggtacaaatgatttctccttttctgcatcctccctggtgccctgctcatgacaaagcctgagtgttgcctgtgctgacaagaagtgctgggacaaggagagagaaagctggtccttctgactatgacttctgtggcaccccagggctcctgcttccctgtccactgtgccccagattggggcaccctggagcagttcccagcttttgtgttggaccttgcttgtctgatctgtggactgtgggcttccccctcaacgtgacctaatctgccatccaatttccaggaaatcctcgtggtttctgctccacccagggcaccccttctgttttccagcaatgctatgccttctctttcttttttttctgagacacagttcactttgtcacctaggctggagtgcactggtgtgatcacggcacgctgcagcctcgacctcctgggctcaattgatcctcccaccttagcctcctgagtaaa
